United States Patent Application Publication US 2026/0021141 A1 - sequence listing, part 6

SEQ ID NO: 153385 - RNA, 22 nt, synthetic construct
  source 1..22: mol_type = other RNA
tggcccctttcaagattgttta

SEQ ID NO: 153386 - RNA, 22 nt, synthetic construct
  source 1..22: mol_type = other RNA
tggccctccatttccctgcttc

SEQ ID NO: 153387 - RNA, 22 nt, synthetic construct
  source 1..22: mol_type = other RNA
tggccctgcgattggttggact

SEQ ID NO: 153388 - RNA, 22 nt, synthetic construct
  source 1..22: mol_type = other RNA
tggccctgttggcctggacaca

SEQ ID NO: 153389 - RNA, 22 nt, synthetic construct
  source 1..22: mol_type = other RNA
tggcccttaacttcacctctac

SEQ ID NO: 153390 - RNA, 22 nt, synthetic construct
  source 1..22: mol_type = other RNA
tggccgaatgtggtggtatgca

SEQ ID NO: 153391 - RNA, 22 nt, synthetic construct
  source 1..22: mol_type = other RNA
tggccgaggccagtccctagtg

SEQ ID NO: 153392 - RNA, 22 nt, synthetic construct
  source 1..22: mol_type = other RNA
tggccgagggagacggcgagct

SEQ ID NO: 153393 - RNA, 22 nt, synthetic construct
  source 1..22: mol_type = other RNA
tggccgggatttacttctatat

SEQ ID NO: 153394 - RNA, 22 nt, synthetic construct
  source 1..22: mol_type = other RNA
tggcctaaatcaggatgtcttt

SEQ ID NO: 153395 - RNA, 22 nt, synthetic construct
  source 1..22: mol_type = other RNA
tggcctaagatggaaagtggac

SEQ ID NO: 153396 - RNA, 22 nt, synthetic construct
  source 1..22: mol_type = other RNA
tggcctccccaagtgctgtgat

SEQ ID NO: 153397 - RNA, 22 nt, synthetic construct
  source 1..22: mol_type = other RNA
tggcctccctcactaagtcaga

SEQ ID NO: 153398 - RNA, 22 nt, synthetic construct
  source 1..22: mol_type = other RNA
tggcctcggccaaccattactc

SEQ ID NO: 153399 - RNA, 22 nt, synthetic construct
  source 1..22: mol_type = other RNA
tggcctctgcggcggctgaggc

SEQ ID NO: 153400 - RNA, 22 nt, synthetic construct
  source 1..22: mol_type = other RNA
tggcctcttcccttgtgcacct

SEQ ID NO: 153401 - RNA, 22 nt, synthetic construct
  source 1..22: mol_type = other RNA
tggcctgagctctcagtggccc

SEQ ID NO: 153402 - RNA, 22 nt, synthetic construct
  source 1..22: mol_type = other RNA
tggcctgcaccatttattgtca

SEQ ID NO: 153403 - RNA, 22 nt, synthetic construct
  source 1..22: mol_type = other RNA
tggcctggacaacagtgtgaga

SEQ ID NO: 153404 - RNA, 22 nt, synthetic construct
  source 1..22: mol_type = other RNA
tggcctggacacacacagtcct

SEQ ID NO: 153405 - RNA, 22 nt, synthetic construct
  source 1..22: mol_type = other RNA
tggccttctatatttttacatt

SEQ ID NO: 153406 - RNA, 22 nt, synthetic construct
  source 1..22: mol_type = other RNA
tggccttctgaggagctgagac

SEQ ID NO: 153407 - RNA, 22 nt, synthetic construct
  source 1..22: mol_type = other RNA
tggccttctttctttcaaatgt

SEQ ID NO: 153408 - RNA, 22 nt, synthetic construct
  source 1..22: mol_type = other RNA
tggccttgaggtgagacagacc

SEQ ID NO: 153409 - RNA, 22 nt, synthetic construct
  source 1..22: mol_type = other RNA
tggcgactcatgcctgtaattc

SEQ ID NO: 153410 - RNA, 22 nt, synthetic construct
  source 1..22: mol_type = other RNA
tggcgcagccatggctcactgc

SEQ ID NO: 153411 - RNA, 22 nt, synthetic construct
  source 1..22: mol_type = other RNA
tggcgcagtgcttagcgctgga

SEQ ID NO: 153412 - RNA, 22 nt, synthetic construct
  source 1..22: mol_type = other RNA
tggcgctccctctgtgtgcatg

SEQ ID NO: 153413 - RNA, 22 nt, synthetic construct
  source 1..22: mol_type = other RNA
tggcgctgtttgcctgcgtccg

SEQ ID NO: 153414 - RNA, 22 nt, synthetic construct
  source 1..22: mol_type = other RNA
tggcggatgccggtaatcacag

SEQ ID NO: 153415 - RNA, 22 nt, synthetic construct
  source 1..22: mol_type = other RNA
tggcggctttgtggagtggagg

SEQ ID NO: 153416 - RNA, 22 nt, synthetic construct
  source 1..22: mol_type = other RNA
tggcgtacatgtagatatggga

SEQ ID NO: 153417 - RNA, 22 nt, synthetic construct
  source 1..22: mol_type = other RNA
tggcgtgtgcccaggctgactt

SEQ ID NO: 153418 - RNA, 22 nt, synthetic construct
  source 1..22: mol_type = other RNA
tggctaaaagaccgcaagagtt

SEQ ID NO: 153419 - RNA, 22 nt, synthetic construct
  source 1..22: mol_type = other RNA
tggctaacaatcaaatttaaca

SEQ ID NO: 153420 - RNA, 22 nt, synthetic construct
  source 1..22: mol_type = other RNA
tggctaatgtggcttgcaaggc

SEQ ID NO: 153421 - RNA, 22 nt, synthetic construct
  source 1..22: mol_type = other RNA
tggctacaccctgggaaagcct

SEQ ID NO: 153422 - RNA, 22 nt, synthetic construct
  source 1..22: mol_type = other RNA
tggctactgtaaacaatgctgc

SEQ ID NO: 153423 - RNA, 22 nt, synthetic construct
  source 1..22: mol_type = other RNA
tggctagaaacttggattgtgt

SEQ ID NO: 153424 - RNA, 22 nt, synthetic construct
  source 1..22: mol_type = other RNA
tggctagaagcatctgatacac

SEQ ID NO: 153425 - RNA, 22 nt, synthetic construct
  source 1..22: mol_type = other RNA
tggctagacggaaaaacattct

SEQ ID NO: 153426 - RNA, 22 nt, synthetic construct
  source 1..22: mol_type = other RNA
tggctagactaagaaaaacaga

SEQ ID NO: 153427 - RNA, 22 nt, synthetic construct
  source 1..22: mol_type = other RNA
tggctagtaggcaacatcccta

SEQ ID NO: 153428 - RNA, 22 nt, synthetic construct
  source 1..22: mol_type = other RNA
tggctagtgtgttgactgacat

SEQ ID NO: 153429 - RNA, 22 nt, synthetic construct
  source 1..22: mol_type = other RNA
tggctataaccacgagtaatgg

SEQ ID NO: 153430 - RNA, 22 nt, synthetic construct
  source 1..22: mol_type = other RNA
tggctattagttaaccttctgg

SEQ ID NO: 153431 - RNA, 22 nt, synthetic construct
  source 1..22: mol_type = other RNA
tggctattgtcagtaattctgc

SEQ ID NO: 153432 - RNA, 22 nt, synthetic construct
  source 1..22: mol_type = other RNA
tggctcaacgcctgtgatccca

SEQ ID NO: 153433 - RNA, 22 nt, synthetic construct
  source 1..22: mol_type = other RNA
tggctcaatggttaagactgct

SEQ ID NO: 153434 - RNA, 22 nt, synthetic construct
  source 1..22: mol_type = other RNA
tggctcacagtgctccatagct

SEQ ID NO: 153435 - RNA, 22 nt, synthetic construct
  source 1..22: mol_type = other RNA
tggctcacattgtatttctgtt

SEQ ID NO: 153436 - RNA, 22 nt, synthetic construct
  source 1..22: mol_type = other RNA
tggctcactcatttccgttgct

SEQ ID NO: 153437 - RNA, 22 nt, synthetic construct
  source 1..22: mol_type = other RNA
tggctcagaaacaacaacaaca

SEQ ID NO: 153438 - RNA, 22 nt, synthetic construct
  source 1..22: mol_type = other RNA
tggctcagtctgtttgccatct

SEQ ID NO: 153439 - RNA, 22 nt, synthetic construct
  source 1..22: mol_type = other RNA
tggctcatacttgctttattac

SEQ ID NO: 153440 - RNA, 22 nt, synthetic construct
  source 1..22: mol_type = other RNA
tggctcccatgattcaaaatgt

SEQ ID NO: 153441 - RNA, 22 nt, synthetic construct
  source 1..22: mol_type = other RNA
tggctcctcccggctaagatga

SEQ ID NO: 153442 - RNA, 22 nt, synthetic construct
  source 1..22: mol_type = other RNA
tggctccttaccactataatcc

SEQ ID NO: 153443 - RNA, 22 nt, synthetic construct
  source 1..22: mol_type = other RNA
tggctctagcccagcttccggg

SEQ ID NO: 153444 - RNA, 22 nt, synthetic construct
  source 1..22: mol_type = other RNA
tggctcttagaaaatatatact

SEQ ID NO: 153445 - RNA, 22 nt, synthetic construct
  source 1..22: mol_type = other RNA
tggctctttccactctctggct

SEQ ID NO: 153446 - RNA, 22 nt, synthetic construct
  source 1..22: mol_type = other RNA
tggctgaaagagaaagaagtaa

SEQ ID NO: 153447 - RNA, 22 nt, synthetic construct
  source 1..22: mol_type = other RNA
tggctgaaatgctgtaactgac

SEQ ID NO: 153448 - RNA, 22 nt, synthetic construct
  source 1..22: mol_type = other RNA
tggctgacatgtgtaaaacatc

SEQ ID NO: 153449 - RNA, 22 nt, synthetic construct
  source 1..22: mol_type = other RNA
tggctgacctggtactctatga

SEQ ID NO: 153450 - RNA, 22 nt, synthetic construct
  source 1..22: mol_type = other RNA
tggctgcaattgcgcagaactg

SEQ ID NO: 153451 - RNA, 22 nt, synthetic construct
  source 1..22: mol_type = other RNA
tggctgcaccattttttcacca

SEQ ID NO: 153452 - RNA, 22 nt, synthetic construct
  source 1..22: mol_type = other RNA
tggctgcagggcttctgaaggt

SEQ ID NO: 153453 - RNA, 22 nt, synthetic construct
  source 1..22: mol_type = other RNA
tggctgcgccactgcactccag

SEQ ID NO: 153454 - RNA, 22 nt, synthetic construct
  source 1..22: mol_type = other RNA
tggctggaatggtgaagaatgt

SEQ ID NO: 153455 - RNA, 22 nt, synthetic construct
  source 1..22: mol_type = other RNA
tggctggcactttcctgataag

SEQ ID NO: 153456 - RNA, 22 nt, synthetic construct
  source 1..22: mol_type = other RNA
tggctgggagcttatcaggctt

SEQ ID NO: 153457 - RNA, 22 nt, synthetic construct
  source 1..22: mol_type = other RNA
tggctgtactaagcctatgtaa

SEQ ID NO: 153458 - RNA, 22 nt, synthetic construct
  source 1..22: mol_type = other RNA
tggctgtcaaaaatgtgtctag

SEQ ID NO: 153459 - RNA, 22 nt, synthetic construct
  source 1..22: mol_type = other RNA
tggctgtgccaactctggcagg

SEQ ID NO: 153460 - RNA, 22 nt, synthetic construct
  source 1..22: mol_type = other RNA
tggctgttaccatttgaccttc

SEQ ID NO: 153461 - RNA, 22 nt, synthetic construct
  source 1..22: mol_type = other RNA
tggctgttagccttgccattct

SEQ ID NO: 153462 - RNA, 22 nt, synthetic construct
  source 1..22: mol_type = other RNA
tggcttaaggaaataaatatgt

SEQ ID NO: 153463 - RNA, 22 nt, synthetic construct
  source 1..22: mol_type = other RNA
tggcttaatgcatataaaaaca

SEQ ID NO: 153464 - RNA, 22 nt, synthetic construct
  source 1..22: mol_type = other RNA
tggcttagaaatgaagatggcc

SEQ ID NO: 153465 - RNA, 22 nt, synthetic construct
  source 1..22: mol_type = other RNA
tggcttaggatcaccaaagact

SEQ ID NO: 153466 - RNA, 22 nt, synthetic construct
  source 1..22: mol_type = other RNA
tggcttcaatatgcagtatgtg

SEQ ID NO: 153467 - RNA, 22 nt, synthetic construct
  source 1..22: mol_type = other RNA
tggcttcagtgccaacacatgg

SEQ ID NO: 153468 - RNA, 22 nt, synthetic construct
  source 1..22: mol_type = other RNA
tggcttcatgggtggaaattaa

SEQ ID NO: 153469 - RNA, 22 nt, synthetic construct
  source 1..22: mol_type = other RNA
tggcttcctaactggtctcctt

SEQ ID NO: 153470 - RNA, 22 nt, synthetic construct
  source 1..22: mol_type = other RNA
tggcttctcaaactgtgtgctt

SEQ ID NO: 153471 - RNA, 22 nt, synthetic construct
  source 1..22: mol_type = other RNA
tggcttgagcccagggggtcga

SEQ ID NO: 153472 - RNA, 22 nt, synthetic construct
  source 1..22: mol_type = other RNA
tggcttgcaaggcccaccatga

SEQ ID NO: 153473 - RNA, 22 nt, synthetic construct
  source 1..22: mol_type = other RNA
tggcttggggaacagtttagca

SEQ ID NO: 153474 - RNA, 22 nt, synthetic construct
  source 1..22: mol_type = other RNA
tggcttgggtgacctcatgtaa

SEQ ID NO: 153475 - RNA, 22 nt, synthetic construct
  source 1..22: mol_type = other RNA
tggcttgtgacatcaagggtgg

SEQ ID NO: 153476 - RNA, 22 nt, synthetic construct
  source 1..22: mol_type = other RNA
tggcttgtggctacaccctggg

SEQ ID NO: 153477 - RNA, 22 nt, synthetic construct
  source 1..22: mol_type = other RNA
tggctttaaggcgcagacacac

SEQ ID NO: 153478 - RNA, 22 nt, synthetic construct
  source 1..22: mol_type = other RNA
tggctttagatggtaaaacaaa

SEQ ID NO: 153479 - RNA, 22 nt, synthetic construct
  source 1..22: mol_type = other RNA
tggctttagatttatcaatagc

SEQ ID NO: 153480 - RNA, 22 nt, synthetic construct
  source 1..22: mol_type = other RNA
tggcttttgagtgtaaggtgtt

SEQ ID NO: 153481 - RNA, 22 nt, synthetic construct
  source 1..22: mol_type = other RNA
tggcttttggcagcgtaactcc

SEQ ID NO: 153482 - RNA, 22 nt, synthetic construct
  source 1..22: mol_type = other RNA
tggctttttacgatgaaattga

SEQ ID NO: 153483 - RNA, 22 nt, synthetic construct
  source 1..22: mol_type = other RNA
tgggaaaaggatttgtttgtga

SEQ ID NO: 153484 - RNA, 22 nt, synthetic construct
  source 1..22: mol_type = other RNA
tgggaaaatctctgacttcatt

SEQ ID NO: 153485 - RNA, 22 nt, synthetic construct
  source 1..22: mol_type = other RNA
tgggaaaatcttggaactttta

SEQ ID NO: 153486 - RNA, 22 nt, synthetic construct
  source 1..22: mol_type = other RNA
tgggaaagacaggtagacatga

SEQ ID NO: 153487 - RNA, 22 nt, synthetic construct
  source 1..22: mol_type = other RNA
tgggaaagcctggctttagatg

SEQ ID NO: 153488 - RNA, 22 nt, synthetic construct
  source 1..22: mol_type = other RNA
tgggaaagtattcccaagatca

SEQ ID NO: 153489 - RNA, 22 nt, synthetic construct
  source 1..22: mol_type = other RNA
tgggaaattagatgatgttttg

SEQ ID NO: 153490 - RNA, 22 nt, synthetic construct
  source 1..22: mol_type = other RNA
tgggaacagcaggggaaggctt

SEQ ID NO: 153491 - RNA, 22 nt, synthetic construct
  source 1..22: mol_type = other RNA
tgggaacagcccctagcatgca

SEQ ID NO: 153492 - RNA, 22 nt, synthetic construct
  source 1..22: mol_type = other RNA
tgggaagaaaaaataaaggctt

SEQ ID NO: 153493 - RNA, 22 nt, synthetic construct
  source 1..22: mol_type = other RNA
tgggaagatgctccctctatgg

SEQ ID NO: 153494 - RNA, 22 nt, synthetic construct
  source 1..22: mol_type = other RNA
tgggaagattggctttagattt

SEQ ID NO: 153495 - RNA, 22 nt, synthetic construct
  source 1..22: mol_type = other RNA
tgggaagcaaaggattcggggg

SEQ ID NO: 153496 - RNA, 22 nt, synthetic construct
  source 1..22: mol_type = other RNA
tgggaaggatggccagtcatgt

SEQ ID NO: 153497 - RNA, 22 nt, synthetic construct
  source 1..22: mol_type = other RNA
tgggaaggccctgattgagatt

SEQ ID NO: 153498 - RNA, 22 nt, synthetic construct
  source 1..22: mol_type = other RNA
tgggaagtggagtgcgagtgtg

SEQ ID NO: 153499 - RNA, 22 nt, synthetic construct
  source 1..22: mol_type = other RNA
tgggaagttatgtagctgggat

SEQ ID NO: 153500 - RNA, 22 nt, synthetic construct
  source 1..22: mol_type = other RNA
tgggaatactttcccatctcta

SEQ ID NO: 153501 - RNA, 22 nt, synthetic construct
  source 1..22: mol_type = other RNA
tgggaatgcatatatctgtctg

SEQ ID NO: 153502 - RNA, 22 nt, synthetic construct
  source 1..22: mol_type = other RNA
tgggaatgtggtcacacttttt

SEQ ID NO: 153503 - RNA, 22 nt, synthetic construct
  source 1..22: mol_type = other RNA
tgggaattcagtcaccaaacgt

SEQ ID NO: 153504 - RNA, 22 nt, synthetic construct
  source 1..22: mol_type = other RNA
tgggacaagtgggtggatgggt

SEQ ID NO: 153505 - RNA, 22 nt, synthetic construct
  source 1..22: mol_type = other RNA
tgggacagagcgagactccgta

SEQ ID NO: 153506 - RNA, 22 nt, synthetic construct
  source 1..22: mol_type = other RNA
tgggaccccgtctctgcaaaaa

SEQ ID NO: 153507 - RNA, 22 nt, synthetic construct
  source 1..22: mol_type = other RNA
tgggactacaggtgtgaaccac

SEQ ID NO: 153508 - RNA, 22 nt, synthetic construct
  source 1..22: mol_type = other RNA
tgggactgagacagtattgtgc

SEQ ID NO: 153509 - RNA, 22 nt, synthetic construct
  source 1..22: mol_type = other RNA
tgggactggagaacagtaaagt

SEQ ID NO: 153510 - RNA, 22 nt, synthetic construct
  source 1..22: mol_type = other RNA
tgggacttcactagtgggtcgg

SEQ ID NO: 153511 - RNA, 22 nt, synthetic construct
  source 1..22: mol_type = other RNA
tgggacttctagcctccagaaa

SEQ ID NO: 153512 - RNA, 22 nt, synthetic construct
  source 1..22: mol_type = other RNA
tgggagaaagaccaagagtgtg

SEQ ID NO: 153513 - RNA, 22 nt, synthetic construct
  source 1..22: mol_type = other RNA
tgggagaaagctaatttggaat

SEQ ID NO: 153514 - RNA, 22 nt, synthetic construct
  source 1..22: mol_type = other RNA
tgggagaatggcaaggctaaca

SEQ ID NO: 153515 - RNA, 22 nt, synthetic construct
  source 1..22: mol_type = other RNA
tgggagaccaggagttcttatg

SEQ ID NO: 153516 - RNA, 22 nt, synthetic construct
  source 1..22: mol_type = other RNA
tgggagaggcatgccgggacaa

SEQ ID NO: 153517 - RNA, 22 nt, synthetic construct
  source 1..22: mol_type = other RNA
tgggagatggacactgcagatg

SEQ ID NO: 153518 - RNA, 22 nt, synthetic construct
  source 1..22: mol_type = other RNA
tgggagatgtgtaattgtacct

SEQ ID NO: 153519 - RNA, 22 nt, synthetic construct
  source 1..22: mol_type = other RNA
tgggagcatgcacacaggagaa

SEQ ID NO: 153520 - RNA, 22 nt, synthetic construct
  source 1..22: mol_type = other RNA
tgggagccaaacttgaaccttc

SEQ ID NO: 153521 - RNA, 22 nt, synthetic construct
  source 1..22: mol_type = other RNA
tgggagccctccaggatccagt

SEQ ID NO: 153522 - RNA, 22 nt, synthetic construct
  source 1..22: mol_type = other RNA
tgggagcttatcaggcttgagt

SEQ ID NO: 153523 - RNA, 22 nt, synthetic construct
  source 1..22: mol_type = other RNA
tgggagctttcattattaccag

SEQ ID NO: 153524 - RNA, 22 nt, synthetic construct
  source 1..22: mol_type = other RNA
tgggaggaggtcatactggagc

SEQ ID NO: 153525 - RNA, 22 nt, synthetic construct
  source 1..22: mol_type = other RNA
tgggaggctgaggcaggtggat

SEQ ID NO: 153526 - RNA, 22 nt, synthetic construct
  source 1..22: mol_type = other RNA
tgggaggctgaggcggaaggat

SEQ ID NO: 153527 - RNA, 22 nt, synthetic construct
  source 1..22: mol_type = other RNA
tgggaggctgaggctggggaat

SEQ ID NO: 153528 - RNA, 22 nt, synthetic construct
  source 1..22: mol_type = other RNA
tgggaggtaatactataaggaa

SEQ ID NO: 153529 - RNA, 22 nt, synthetic construct
  source 1..22: mol_type = other RNA
tgggaggttgaggctgcagtga

SEQ ID NO: 153530 - RNA, 22 nt, synthetic construct
  source 1..22: mol_type = other RNA
tgggagtacaagaccagcctgg

SEQ ID NO: 153531 - RNA, 22 nt, synthetic construct
  source 1..22: mol_type = other RNA
tgggagtccctgctttcagttc

SEQ ID NO: 153532 - RNA, 22 nt, synthetic construct
  source 1..22: mol_type = other RNA
tgggagtctatttctgaacaaa

SEQ ID NO: 153533 - RNA, 22 nt, synthetic construct
  source 1..22: mol_type = other RNA
tgggagttcattagaattcagg

SEQ ID NO: 153534 - RNA, 22 nt, synthetic construct
  source 1..22: mol_type = other RNA
tgggataatgagtttaattctt

SEQ ID NO: 153535 - RNA, 22 nt, synthetic construct
  source 1..22: mol_type = other RNA
tgggataatgctatcattttaa

SEQ ID NO: 153536 - RNA, 22 nt, synthetic construct
  source 1..22: mol_type = other RNA
tgggatacttctaactttagaa

SEQ ID NO: 153537 - RNA, 22 nt, synthetic construct
  source 1..22: mol_type = other RNA
tgggatatagctacaatgattt

SEQ ID NO: 153538 - RNA, 22 nt, synthetic construct
  source 1..22: mol_type = other RNA
tgggatatctaacataatcaaa

SEQ ID NO: 153539 - RNA, 22 nt, synthetic construct
  source 1..22: mol_type = other RNA
tgggatcaaaccatgttcatgg

SEQ ID NO: 153540 - RNA, 22 nt, synthetic construct
  source 1..22: mol_type = other RNA
tgggatcacacttgatggtttg

SEQ ID NO: 153541 - RNA, 22 nt, synthetic construct
  source 1..22: mol_type = other RNA
tgggatcacaggcgttgagcca

SEQ ID NO: 153542 - RNA, 22 nt, synthetic construct
  source 1..22: mol_type = other RNA
tgggatcctaagcatgagatac

SEQ ID NO: 153543 - RNA, 22 nt, synthetic construct
  source 1..22: mol_type = other RNA
tgggatctctgggctcactgca

SEQ ID NO: 153544 - RNA, 22 nt, synthetic construct
  source 1..22: mol_type = other RNA
tgggatctgataaattattagc

SEQ ID NO: 153545 - RNA, 22 nt, synthetic construct
  source 1..22: mol_type = other RNA
tgggatctgtcatgtttgaatt

SEQ ID NO: 153546 - RNA, 22 nt, synthetic construct
  source 1..22: mol_type = other RNA
tgggatgcaagaatggtttaac

SEQ ID NO: 153547 - RNA, 22 nt, synthetic construct
  source 1..22: mol_type = other RNA
tgggatgcagcaaaagcaccac

SEQ ID NO: 153548 - RNA, 22 nt, synthetic construct
  source 1..22: mol_type = other RNA
tgggatgctcagtttcaaaagc

SEQ ID NO: 153549 - RNA, 22 nt, synthetic construct
  source 1..22: mol_type = other RNA
tgggatgcttaaagcgctactc

SEQ ID NO: 153550 - RNA, 22 nt, synthetic construct
  source 1..22: mol_type = other RNA
tgggatggctgaaagagaaaga

SEQ ID NO: 153551 - RNA, 22 nt, synthetic construct
  source 1..22: mol_type = other RNA
tgggatgtttctacctttggct

SEQ ID NO: 153552 - RNA, 22 nt, synthetic construct
  source 1..22: mol_type = other RNA
tgggattacacacacctaccac

SEQ ID NO: 153553 - RNA, 22 nt, synthetic construct
  source 1..22: mol_type = other RNA
tgggattacaggcgcacgccat

SEQ ID NO: 153554 - RNA, 22 nt, synthetic construct
  source 1..22: mol_type = other RNA
tgggattagcttattctttttc

SEQ ID NO: 153555 - RNA, 22 nt, synthetic construct
  source 1..22: mol_type = other RNA
tgggcaaaaaagtcatgacctg

SEQ ID NO: 153556 - RNA, 22 nt, synthetic construct
  source 1..22: mol_type = other RNA
tgggcaacagagacagagaatc

SEQ ID NO: 153557 - RNA, 22 nt, synthetic construct
  source 1..22: mol_type = other RNA
tgggcaagagagcaagtcccca

SEQ ID NO: 153558 - RNA, 22 nt, synthetic construct
  source 1..22: mol_type = other RNA
tgggcaatatagcgagacctca

SEQ ID NO: 153559 - RNA, 22 nt, synthetic construct
  source 1..22: mol_type = other RNA
tgggcaatatagtgggaccccg

SEQ ID NO: 153560 - RNA, 22 nt, synthetic construct
  source 1..22: mol_type = other RNA
tgggcacacgccactgcaggtg

SEQ ID NO: 153561 - RNA, 22 nt, synthetic construct
  source 1..22: mol_type = other RNA
tgggcacactccccagtggttg

SEQ ID NO: 153562 - RNA, 22 nt, synthetic construct
  source 1..22: mol_type = other RNA
tgggcactgggagccctccagg

SEQ ID NO: 153563 - RNA, 22 nt, synthetic construct
  source 1..22: mol_type = other RNA
tgggcacttgggatgtttctac

SEQ ID NO: 153564 - RNA, 22 nt, synthetic construct
  source 1..22: mol_type = other RNA
tgggcagactccttcccctggt

SEQ ID NO: 153565 - RNA, 22 nt, synthetic construct
  source 1..22: mol_type = other RNA
tgggcatgggtccaagacagga

SEQ ID NO: 153566 - RNA, 22 nt, synthetic construct
  source 1..22: mol_type = other RNA
tgggcattaattgagagctttc

SEQ ID NO: 153567 - RNA, 22 nt, synthetic construct
  source 1..22: mol_type = other RNA
tgggcattagaagttaaattga

SEQ ID NO: 153568 - RNA, 22 nt, synthetic construct
  source 1..22: mol_type = other RNA
tgggcattccagagggtaacgt

SEQ ID NO: 153569 - RNA, 22 nt, synthetic construct
  source 1..22: mol_type = other RNA
tgggccaaagacagatcttatg

SEQ ID NO: 153570 - RNA, 22 nt, synthetic construct
  source 1..22: mol_type = other RNA
tgggccaaagacttcaacggac

SEQ ID NO: 153571 - RNA, 22 nt, synthetic construct
  source 1..22: mol_type = other RNA
tgggccaacttccagcaagact

SEQ ID NO: 153572 - RNA, 22 nt, synthetic construct
  source 1..22: mol_type = other RNA
tgggccaccaagccctgcctta

SEQ ID NO: 153573 - RNA, 22 nt, synthetic construct
  source 1..22: mol_type = other RNA
tgggcccactctccccaagtaa

SEQ ID NO: 153574 - RNA, 22 nt, synthetic construct
  source 1..22: mol_type = other RNA
tgggcccagcagaaggtgaggg

SEQ ID NO: 153575 - RNA, 22 nt, synthetic construct
  source 1..22: mol_type = other RNA
tgggcccgcagtggctcatgcc

SEQ ID NO: 153576 - RNA, 22 nt, synthetic construct
  source 1..22: mol_type = other RNA
tgggccttgcaagccacattag

SEQ ID NO: 153577 - RNA, 22 nt, synthetic construct
  source 1..22: mol_type = other RNA
tgggcctttctgtttgtttgtt

SEQ ID NO: 153578 - RNA, 22 nt, synthetic construct
  source 1..22: mol_type = other RNA
tgggcgacaagagcagaactcc

SEQ ID NO: 153579 - RNA, 22 nt, synthetic construct
  source 1..22: mol_type = other RNA
tgggcgacagagtgaaactctg

SEQ ID NO: 153580 - RNA, 22 nt, synthetic construct
  source 1..22: mol_type = other RNA
tgggcgagatggcgtgcgcctg

SEQ ID NO: 153581 - RNA, 22 nt, synthetic construct
  source 1..22: mol_type = other RNA
tgggcgtggagcggtgtcttat

SEQ ID NO: 153582 - RNA, 22 nt, synthetic construct
  source 1..22: mol_type = other RNA
tgggctaaggtggagtggtgga

SEQ ID NO: 153583 - RNA, 22 nt, synthetic construct
  source 1..22: mol_type = other RNA
tgggctagagccaggaagtcag

SEQ ID NO: 153584 - RNA, 22 nt, synthetic construct
  source 1..22: mol_type = other RNA
tgggctagggaagcagttgatg

SEQ ID NO: 153585 - RNA, 22 nt, synthetic construct
  source 1..22: mol_type = other RNA
tgggctattaagtattgcattg

SEQ ID NO: 153586 - RNA, 22 nt, synthetic construct
  source 1..22: mol_type = other RNA
tgggctattgttttgcaagatt

SEQ ID NO: 153587 - RNA, 22 nt, synthetic construct
  source 1..22: mol_type = other RNA
tgggctcaagccatcctccagc

SEQ ID NO: 153588 - RNA, 22 nt, synthetic construct
  source 1..22: mol_type = other RNA
tgggctcactgcaacttccgcc

SEQ ID NO: 153589 - RNA, 22 nt, synthetic construct
  source 1..22: mol_type = other RNA
tgggctcatctaagcctacctc

SEQ ID NO: 153590 - RNA, 22 nt, synthetic construct
  source 1..22: mol_type = other RNA
tgggctcccttccagcgtgtgc

SEQ ID NO: 153591 - RNA, 22 nt, synthetic construct
  source 1..22: mol_type = other RNA
tgggctctctattccaaatgtc

SEQ ID NO: 153592 - RNA, 22 nt, synthetic construct
  source 1..22: mol_type = other RNA
tgggcttaacatttgaactcac

SEQ ID NO: 153593 - RNA, 22 nt, synthetic construct
  source 1..22: mol_type = other RNA
tgggcttatcagatggtgatac

SEQ ID NO: 153594 - RNA, 22 nt, synthetic construct
  source 1..22: mol_type = other RNA
tgggcttcactttcgtcatcta

SEQ ID NO: 153595 - RNA, 22 nt, synthetic construct
  source 1..22: mol_type = other RNA
tgggcttggttggaaaagaaag

SEQ ID NO: 153596 - RNA, 22 nt, synthetic construct
  source 1..22: mol_type = other RNA
tgggctttctccaggggcggcc

SEQ ID NO: 153597 - RNA, 22 nt, synthetic construct
  source 1..22: mol_type = other RNA
tgggctttgagaaaggtttctt

SEQ ID NO: 153598 - RNA, 22 nt, synthetic construct
  source 1..22: mol_type = other RNA
tgggcttttcatatacgtattt

SEQ ID NO: 153599 - RNA, 22 nt, synthetic construct
  source 1..22: mol_type = other RNA
tggggaaatagatgcctagaaa

SEQ ID NO: 153600 - RNA, 22 nt, synthetic construct
  source 1..22: mol_type = other RNA
tggggaacagtttagcaatcca

SEQ ID NO: 153601 - RNA, 22 nt, synthetic construct
  source 1..22: mol_type = other RNA
tggggaataagattttaggtca

SEQ ID NO: 153602 - RNA, 22 nt, synthetic construct
  source 1..22: mol_type = other RNA
tggggaatgctcataattaaag

SEQ ID NO: 153603 - RNA, 22 nt, synthetic construct
  source 1..22: mol_type = other RNA
tggggaattgcatgagacttgg

SEQ ID NO: 153604 - RNA, 22 nt, synthetic construct
  source 1..22: mol_type = other RNA
tggggacagctcaattaagcaa

SEQ ID NO: 153605 - RNA, 22 nt, synthetic construct
  source 1..22: mol_type = other RNA
tggggacccctccctgctttaa

SEQ ID NO: 153606 - RNA, 22 nt, synthetic construct
  source 1..22: mol_type = other RNA
tggggactcttatggctataac

SEQ ID NO: 153607 - RNA, 22 nt, synthetic construct
  source 1..22: mol_type = other RNA
tggggacttgctctcttgccca

SEQ ID NO: 153608 - RNA, 22 nt, synthetic construct
  source 1..22: mol_type = other RNA
tggggactttgtggcctcttcc

SEQ ID NO: 153609 - RNA, 22 nt, synthetic construct
  source 1..22: mol_type = other RNA
tggggagagtgggcccagcaga

SEQ ID NO: 153610 - RNA, 22 nt, synthetic construct
  source 1..22: mol_type = other RNA
tggggagataccttgaaaggat

SEQ ID NO: 153611 - RNA, 22 nt, synthetic construct
  source 1..22: mol_type = other RNA
tggggagctagagggtaagacc

SEQ ID NO: 153612 - RNA, 22 nt, synthetic construct
  source 1..22: mol_type = other RNA
tggggaggccaaggcaggactg

SEQ ID NO: 153613 - RNA, 22 nt, synthetic construct
  source 1..22: mol_type = other RNA
tggggagtgtgcccaaggaagg

SEQ ID NO: 153614 - RNA, 22 nt, synthetic construct
  source 1..22: mol_type = other RNA
tggggagttttaggaaaataga

SEQ ID NO: 153615 - RNA, 22 nt, synthetic construct
  source 1..22: mol_type = other RNA
tggggatatccaaagataaagg

SEQ ID NO: 153616 - RNA, 22 nt, synthetic construct
  source 1..22: mol_type = other RNA
tggggatgcaacaaatgttgca

SEQ ID NO: 153617 - RNA, 22 nt, synthetic construct
  source 1..22: mol_type = other RNA
tggggatgctgtctataggcaa

SEQ ID NO: 153618 - RNA, 22 nt, synthetic construct
  source 1..22: mol_type = other RNA
tggggattctgctactagcaag

SEQ ID NO: 153619 - RNA, 22 nt, synthetic construct
  source 1..22: mol_type = other RNA
tggggattgagggttagatttt

SEQ ID NO: 153620 - RNA, 22 nt, synthetic construct
  source 1..22: mol_type = other RNA
tggggcaatctcagctcattac

SEQ ID NO: 153621 - RNA, 22 nt, synthetic construct
  source 1..22: mol_type = other RNA
tggggcacctaaaaggttgctt

SEQ ID NO: 153622 - RNA, 22 nt, synthetic construct
  source 1..22: mol_type = other RNA
tggggcagcaaagcaagaaaaa

SEQ ID NO: 153623 - RNA, 22 nt, synthetic construct
  source 1..22: mol_type = other RNA
tggggccatctgaattcaagtt

SEQ ID NO: 153624 - RNA, 22 nt, synthetic construct
  source 1..22: mol_type = other RNA
tggggcctcagcatgtcttcag

SEQ ID NO: 153625 - RNA, 22 nt, synthetic construct
  source 1..22: mol_type = other RNA
tggggcgatcttggctcaccac

SEQ ID NO: 153626 - RNA, 22 nt, synthetic construct
  source 1..22: mol_type = other RNA
tggggctaggatttcagtaaat

SEQ ID NO: 153627 - RNA, 22 nt, synthetic construct
  source 1..22: mol_type = other RNA
tggggctcaagtaagtgaaatc

SEQ ID NO: 153628 - RNA, 22 nt, synthetic construct
  source 1..22: mol_type = other RNA
tggggctctaatgcaagagtta

SEQ ID NO: 153629 - RNA, 22 nt, synthetic construct
  source 1..22: mol_type = other RNA
tggggcttgaacccgaggtgca

SEQ ID NO: 153630 - RNA, 22 nt, synthetic construct
  source 1..22: mol_type = other RNA
tggggctttactgtattaggat

SEQ ID NO: 153631 - RNA, 22 nt, synthetic construct
  source 1..22: mol_type = other RNA
tggggcttttgaacactctgca

SEQ ID NO: 153632 - RNA, 22 nt, synthetic construct
  source 1..22: mol_type = other RNA
tgggggaaaattgacatttttc

SEQ ID NO: 153633 - RNA, 22 nt, synthetic construct
  source 1..22: mol_type = other RNA
tgggggaagagagcattgcctt

SEQ ID NO: 153634 - RNA, 22 nt, synthetic construct
  source 1..22: mol_type = other RNA
tgggggaagcaggaactcatat

SEQ ID NO: 153635 - RNA, 22 nt, synthetic construct
  source 1..22: mol_type = other RNA
tgggggacgacgtatgcaactt

SEQ ID NO: 153636 - RNA, 22 nt, synthetic construct
  source 1..22: mol_type = other RNA
tgggggagactgtgcaatgtga

SEQ ID NO: 153637 - RNA, 22 nt, synthetic construct
  source 1..22: mol_type = other RNA
tgggggatccaggggaatagaa

SEQ ID NO: 153638 - RNA, 22 nt, synthetic construct
  source 1..22: mol_type = other RNA
tgggggcatcaaagctaccctt

SEQ ID NO: 153639 - RNA, 22 nt, synthetic construct
  source 1..22: mol_type = other RNA
tgggggcgcgtgcctatggtcc

SEQ ID NO: 153640 - RNA, 22 nt, synthetic construct
  source 1..22: mol_type = other RNA
tgggggctcacatctgtaatct

SEQ ID NO: 153641 - RNA, 22 nt, synthetic construct
  source 1..22: mol_type = other RNA
tgggggctggacataagggtct

SEQ ID NO: 153642 - RNA, 22 nt, synthetic construct
  source 1..22: mol_type = other RNA
tggggggatgtagaaggatatg

SEQ ID NO: 153643 - RNA, 22 nt, synthetic construct
  source 1..22: mol_type = other RNA
tgggggtaagattgtggtccag

SEQ ID NO: 153644 - RNA, 22 nt, synthetic construct
  source 1..22: mol_type = other RNA
tggggtaattttggggccatct

SEQ ID NO: 153645 - RNA, 22 nt, synthetic construct
  source 1..22: mol_type = other RNA
tggggtatgtttgattagttga

SEQ ID NO: 153646 - RNA, 22 nt, synthetic construct
  source 1..22: mol_type = other RNA
tggggtctcattgtgttgccca

SEQ ID NO: 153647 - RNA, 22 nt, synthetic construct
  source 1..22: mol_type = other RNA
tggggtcttagttctgcttcca

SEQ ID NO: 153648 - RNA, 22 nt, synthetic construct
  source 1..22: mol_type = other RNA
tggggttagggcctagaaatca

SEQ ID NO: 153649 - RNA, 22 nt, synthetic construct
  source 1..22: mol_type = other RNA
tggggttcaaaccacctaacta

SEQ ID NO: 153650 - RNA, 22 nt, synthetic construct
  source 1..22: mol_type = other RNA
tggggtttccttacctttatct

SEQ ID NO: 153651 - RNA, 22 nt, synthetic construct
  source 1..22: mol_type = other RNA
tggggtttgtccatgttggtca

SEQ ID NO: 153652 - RNA, 22 nt, synthetic construct
  source 1..22: mol_type = other RNA
tggggtttttatggttttaagt

SEQ ID NO: 153653 - RNA, 22 nt, synthetic construct
  source 1..22: mol_type = other RNA
tgggtaaacaagactcaacatg

SEQ ID NO: 153654 - RNA, 22 nt, synthetic construct
  source 1..22: mol_type = other RNA
tgggtaaatttctaaaaacgtg

SEQ ID NO: 153655 - RNA, 22 nt, synthetic construct
  source 1..22: mol_type = other RNA
tgggtaatttatctccataagt

SEQ ID NO: 153656 - RNA, 22 nt, synthetic construct
  source 1..22: mol_type = other RNA
tgggtacagggtttctgtttgg

SEQ ID NO: 153657 - RNA, 22 nt, synthetic construct
  source 1..22: mol_type = other RNA
tgggtagaagcagcaagggtgg

SEQ ID NO: 153658 - RNA, 22 nt, synthetic construct
  source 1..22: mol_type = other RNA
tgggtagactgtaaaaattttc

SEQ ID NO: 153659 - RNA, 22 nt, synthetic construct
  source 1..22: mol_type = other RNA
tgggtagagactggatcctgga

SEQ ID NO: 153660 - RNA, 22 nt, synthetic construct
  source 1..22: mol_type = other RNA
tgggtaggaagctgatcaagga

SEQ ID NO: 153661 - RNA, 22 nt, synthetic construct
  source 1..22: mol_type = other RNA
tgggtataaatgatgagctact

SEQ ID NO: 153662 - RNA, 22 nt, synthetic construct
  source 1..22: mol_type = other RNA
tgggtatacagcaaaagaatta

SEQ ID NO: 153663 - RNA, 22 nt, synthetic construct
  source 1..22: mol_type = other RNA
tgggtattttgttgttgttgtt

SEQ ID NO: 153664 - RNA, 22 nt, synthetic construct
  source 1..22: mol_type = other RNA
tgggtcaacaaactaactagaa

SEQ ID NO: 153665 - RNA, 22 nt, synthetic construct
  source 1..22: mol_type = other RNA
tgggtcaaccactaaggtcaac

SEQ ID NO: 153666 - RNA, 22 nt, synthetic construct
  source 1..22: mol_type = other RNA
tgggtcagaatcgtgatagtct

SEQ ID NO: 153667 - RNA, 22 nt, synthetic construct
  source 1..22: mol_type = other RNA
tgggtcagctagtgtgtctgac

SEQ ID NO: 153668 - RNA, 22 nt, synthetic construct
  source 1..22: mol_type = other RNA
tgggtccaagacaggaagaatt

SEQ ID NO: 153669 - RNA, 22 nt, synthetic construct
  source 1..22: mol_type = other RNA
tgggtccccggaggaggtggcg

SEQ ID NO: 153670 - RNA, 22 nt, synthetic construct
  source 1..22: mol_type = other RNA
tgggtcgggtgtcagaaaccat

SEQ ID NO: 153671 - RNA, 22 nt, synthetic construct
  source 1..22: mol_type = other RNA
tgggtctatagtttaattgggg

SEQ ID NO: 153672 - RNA, 22 nt, synthetic construct
  source 1..22: mol_type = other RNA
tgggtctccattttggtcttac

SEQ ID NO: 153673 - RNA, 22 nt, synthetic construct
  source 1..22: mol_type = other RNA
tgggtcttataggttgaatagg

SEQ ID NO: 153674 - RNA, 22 nt, synthetic construct
  source 1..22: mol_type = other RNA
tgggtgaataacccatatcttt

SEQ ID NO: 153675 - RNA, 22 nt, synthetic construct
  source 1..22: mol_type = other RNA
tgggtgacagagagagaccttt

SEQ ID NO: 153676 - RNA, 22 nt, synthetic construct
  source 1..22: mol_type = other RNA
tgggtgacctcatgtaactaat

SEQ ID NO: 153677 - RNA, 22 nt, synthetic construct
  source 1..22: mol_type = other RNA
tgggtgatatctgtaagtcatc

SEQ ID NO: 153678 - RNA, 22 nt, synthetic construct
  source 1..22: mol_type = other RNA
tgggtgatgttcaaccctcggc

SEQ ID NO: 153679 - RNA, 22 nt, synthetic construct
  source 1..22: mol_type = other RNA
tgggtgcgttgaccgctttcgt

SEQ ID NO: 153680 - RNA, 22 nt, synthetic construct
  source 1..22: mol_type = other RNA
tgggtggaaattaaacacaccc

SEQ ID NO: 153681 - RNA, 22 nt, synthetic construct
  source 1..22: mol_type = other RNA
tgggtggaagctgtccttctcg

SEQ ID NO: 153682 - RNA, 22 nt, synthetic construct
  source 1..22: mol_type = other RNA
tgggtggatgggtgtagggttt

SEQ ID NO: 153683 - RNA, 22 nt, synthetic construct
  source 1..22: mol_type = other RNA
tgggtgtagggggaaaactcca

SEQ ID NO: 153684 - RNA, 22 nt, synthetic construct
  source 1..22: mol_type = other RNA
tgggtgtagggtttggcagttt

SEQ ID NO: 153685 - RNA, 22 nt, synthetic construct
  source 1..22: mol_type = other RNA
tgggtgtgcacgtttgctttgg

SEQ ID NO: 153686 - RNA, 22 nt, synthetic construct
  source 1..22: mol_type = other RNA
tgggttaaaagttagctggcaa

SEQ ID NO: 153687 - RNA, 22 nt, synthetic construct
  source 1..22: mol_type = other RNA
tgggttattcacccaagaattt

SEQ ID NO: 153688 - RNA, 22 nt, synthetic construct
  source 1..22: mol_type = other RNA
tgggttcaattatgtggaaaaa

SEQ ID NO: 153689 - RNA, 22 nt, synthetic construct
  source 1..22: mol_type = other RNA
tgggttcaggtgcctcctgcct

SEQ ID NO: 153690 - RNA, 22 nt, synthetic construct
  source 1..22: mol_type = other RNA
tgggttctcaccaacatccaca

SEQ ID NO: 153691 - RNA, 22 nt, synthetic construct
  source 1..22: mol_type = other RNA
tgggttctcccttctattccat

SEQ ID NO: 153692 - RNA, 22 nt, synthetic construct
  source 1..22: mol_type = other RNA
tgggttgatttttaatgagata

SEQ ID NO: 153693 - RNA, 22 nt, synthetic construct
  source 1..22: mol_type = other RNA
tgggttggaggagaaggccttc

SEQ ID NO: 153694 - RNA, 22 nt, synthetic construct
  source 1..22: mol_type = other RNA
tgggtttaaaagagtgcacatt

SEQ ID NO: 153695 - RNA, 22 nt, synthetic construct
  source 1..22: mol_type = other RNA
tgggtttaactgaggtgttttt

SEQ ID NO: 153696 - RNA, 22 nt, synthetic construct
  source 1..22: mol_type = other RNA
tgggtttgagtttccagaaaac

SEQ ID NO: 153697 - RNA, 22 nt, synthetic construct
  source 1..22: mol_type = other RNA
tggtaaaaagtgcttctagtaa

SEQ ID NO: 153698 - RNA, 22 nt, synthetic construct
  source 1..22: mol_type = other RNA
tggtaaaacaaattccctctac

SEQ ID NO: 153699 - RNA, 22 nt, synthetic construct
  source 1..22: mol_type = other RNA
tggtaaaatcactaattcaagt

SEQ ID NO: 153700 - RNA, 22 nt, synthetic construct
  source 1..22: mol_type = other RNA
tggtaaaatgtggcaaatttat

SEQ ID NO: 153701 - RNA, 22 nt, synthetic construct
  source 1..22: mol_type = other RNA
tggtaaacagcagtcttaacca

SEQ ID NO: 153702 - RNA, 22 nt, synthetic construct
  source 1..22: mol_type = other RNA
tggtaaattggtcctggaaaaa

SEQ ID NO: 153703 - RNA, 22 nt, synthetic construct
  source 1..22: mol_type = other RNA
tggtaacagccaaataaaacac

SEQ ID NO: 153704 - RNA, 22 nt, synthetic construct
  source 1..22: mol_type = other RNA
tggtaactagatgcctcgaagg

SEQ ID NO: 153705 - RNA, 22 nt, synthetic construct
  source 1..22: mol_type = other RNA
tggtaactcctgttctttggag

SEQ ID NO: 153706 - RNA, 22 nt, synthetic construct
  source 1..22: mol_type = other RNA
tggtaactgatgtgaggatctg

SEQ ID NO: 153707 - RNA, 22 nt, synthetic construct
  source 1..22: mol_type = other RNA
tggtaagaacacttaacatgag

SEQ ID NO: 153708 - RNA, 22 nt, synthetic construct
  source 1..22: mol_type = other RNA
tggtaagagtgagaccctgtct

SEQ ID NO: 153709 - RNA, 22 nt, synthetic construct
  source 1..22: mol_type = other RNA
tggtaagctgtgagtccttcca

SEQ ID NO: 153710 - RNA, 22 nt, synthetic construct
  source 1..22: mol_type = other RNA
tggtaaggaaacagagttttcc

SEQ ID NO: 153711 - RNA, 22 nt, synthetic construct
  source 1..22: mol_type = other RNA
tggtaaggactgaagtcctttc

SEQ ID NO: 153712 - RNA, 22 nt, synthetic construct
  source 1..22: mol_type = other RNA
tggtaaggagccaaacatcatg

SEQ ID NO: 153713 - RNA, 22 nt, synthetic construct
  source 1..22: mol_type = other RNA
tggtaataatgaaagctcccaa

SEQ ID NO: 153714 - RNA, 22 nt, synthetic construct
  source 1..22: mol_type = other RNA
tggtaatacagtctgatttact

SEQ ID NO: 153715 - RNA, 22 nt, synthetic construct
  source 1..22: mol_type = other RNA
tggtaatgaatagaaaatcctt

SEQ ID NO: 153716 - RNA, 22 nt, synthetic construct
  source 1..22: mol_type = other RNA
tggtaatgggaaagacaggtag

SEQ ID NO: 153717 - RNA, 22 nt, synthetic construct
  source 1..22: mol_type = other RNA
tggtaatgttatatttccgtat

SEQ ID NO: 153718 - RNA, 22 nt, synthetic construct
  source 1..22: mol_type = other RNA
tggtaattggttcgtttgaggc

SEQ ID NO: 153719 - RNA, 22 nt, synthetic construct
  source 1..22: mol_type = other RNA
tggtaatttgtccatctggatt

SEQ ID NO: 153720 - RNA, 22 nt, synthetic construct
  source 1..22: mol_type = other RNA
tggtaccaaagcagaaatacag

SEQ ID NO: 153721 - RNA, 22 nt, synthetic construct
  source 1..22: mol_type = other RNA
tggtactctatgatatatactt

SEQ ID NO: 153722 - RNA, 22 nt, synthetic construct
  source 1..22: mol_type = other RNA
tggtactgcctccacaggcttt

SEQ ID NO: 153723 - RNA, 22 nt, synthetic construct
  source 1..22: mol_type = other RNA
tggtactggtaccaaagcagaa

SEQ ID NO: 153724 - RNA, 22 nt, synthetic construct
  source 1..22: mol_type = other RNA
tggtagaccatataatctaacc

SEQ ID NO: 153725 - RNA, 22 nt, synthetic construct
  source 1..22: mol_type = other RNA
tggtagaggattccaggtttac

SEQ ID NO: 153726 - RNA, 22 nt, synthetic construct
  source 1..22: mol_type = other RNA
tggtagataccagaccctttat

SEQ ID NO: 153727 - RNA, 22 nt, synthetic construct
  source 1..22: mol_type = other RNA
tggtagatttctgcatagagat

SEQ ID NO: 153728 - RNA, 22 nt, synthetic construct
  source 1..22: mol_type = other RNA
tggtagcttgggctaaggtgga

SEQ ID NO: 153729 - RNA, 22 nt, synthetic construct
  source 1..22: mol_type = other RNA
tggtaggccaaggcgggaggat

SEQ ID NO: 153730 - RNA, 22 nt, synthetic construct
  source 1..22: mol_type = other RNA
tggtagggagggggctgaggat

SEQ ID NO: 153731 - RNA, 22 nt, synthetic construct
  source 1..22: mol_type = other RNA
tggtaggtgctttttgtatcct

SEQ ID NO: 153732 - RNA, 22 nt, synthetic construct
  source 1..22: mol_type = other RNA
tggtaggtgtgtgtaatcccag

SEQ ID NO: 153733 - RNA, 22 nt, synthetic construct
  source 1..22: mol_type = other RNA
tggtagtaaggatcgttagtat

SEQ ID NO: 153734 - RNA, 22 nt, synthetic construct
  source 1..22: mol_type = other RNA
tggtagtcaacacttttccagt

SEQ ID NO: 153735 - RNA, 22 nt, synthetic construct
  source 1..22: mol_type = other RNA
tggtagtcaatgcaatgcgtgt

SEQ ID NO: 153736 - RNA, 22 nt, synthetic construct
  source 1..22: mol_type = other RNA
tggtagttacacaagtgtttca

SEQ ID NO: 153737 - RNA, 22 nt, synthetic construct
  source 1..22: mol_type = other RNA
tggtagtttgcacgtttttaga

SEQ ID NO: 153738 - RNA, 22 nt, synthetic construct
  source 1..22: mol_type = other RNA
tggtatcaattgtaatgtctcc

SEQ ID NO: 153739 - RNA, 22 nt, synthetic construct
  source 1..22: mol_type = other RNA
tggtatcactttttgtatttcc

SEQ ID NO: 153740 - RNA, 22 nt, synthetic construct
  source 1..22: mol_type = other RNA
tggtatctaccaaaaaactacg

SEQ ID NO: 153741 - RNA, 22 nt, synthetic construct
  source 1..22: mol_type = other RNA
tggtatgagtgtttcccttaaa

SEQ ID NO: 153742 - RNA, 22 nt, synthetic construct
  source 1..22: mol_type = other RNA
tggtatgcactgtactcctaga

SEQ ID NO: 153743 - RNA, 22 nt, synthetic construct
  source 1..22: mol_type = other RNA
tggtatgcatcttgaactaagt

SEQ ID NO: 153744 - RNA, 22 nt, synthetic construct
  source 1..22: mol_type = other RNA
tggtatgggagatgtgtaattg

SEQ ID NO: 153745 - RNA, 22 nt, synthetic construct
  source 1..22: mol_type = other RNA
tggtatgtgccatctccttaat

SEQ ID NO: 153746 - RNA, 22 nt, synthetic construct
  source 1..22: mol_type = other RNA
tggtatgttgtgttttcattcg

SEQ ID NO: 153747 - RNA, 22 nt, synthetic construct
  source 1..22: mol_type = other RNA
tggtattctatcatcaagacag

SEQ ID NO: 153748 - RNA, 22 nt, synthetic construct
  source 1..22: mol_type = other RNA
tggtattctgaactttcaacct

SEQ ID NO: 153749 - RNA, 22 nt, synthetic construct
  source 1..22: mol_type = other RNA
tggtattcttatccctacctaa

SEQ ID NO: 153750 - RNA, 22 nt, synthetic construct
  source 1..22: mol_type = other RNA
tggtatttaatctgtcagcagt

SEQ ID NO: 153751 - RNA, 22 nt, synthetic construct
  source 1..22: mol_type = other RNA
tggtattttttagagacagggt

SEQ ID NO: 153752 - RNA, 22 nt, synthetic construct
  source 1..22: mol_type = other RNA
tggtcaaaactgtattttctaa

SEQ ID NO: 153753 - RNA, 22 nt, synthetic construct
  source 1..22: mol_type = other RNA
tggtcaaatcaatacttcattt

SEQ ID NO: 153754 - RNA, 22 nt, synthetic construct
  source 1..22: mol_type = other RNA
tggtcaacagggtaagattccg

SEQ ID NO: 153755 - RNA, 22 nt, synthetic construct
  source 1..22: mol_type = other RNA
tggtcaacatgaaaagatactc

SEQ ID NO: 153756 - RNA, 22 nt, synthetic construct
  source 1..22: mol_type = other RNA
tggtcaattgatctgccaggac

SEQ ID NO: 153757 - RNA, 22 nt, synthetic construct
  source 1..22: mol_type = other RNA
tggtcaatttcatcgtaaaaag

SEQ ID NO: 153758 - RNA, 22 nt, synthetic construct
  source 1..22: mol_type = other RNA
tggtcacaaacacaaaacaaat

SEQ ID NO: 153759 - RNA, 22 nt, synthetic construct
  source 1..22: mol_type = other RNA
tggtcacactttttgtgagttt

SEQ ID NO: 153760 - RNA, 22 nt, synthetic construct
  source 1..22: mol_type = other RNA
tggtcactgctgatgtaagtgg

SEQ ID NO: 153761 - RNA, 22 nt, synthetic construct
  source 1..22: mol_type = other RNA
tggtcactggccactgattgag

SEQ ID NO: 153762 - RNA, 22 nt, synthetic construct
  source 1..22: mol_type = other RNA
tggtcactgtttggacagtaaa

SEQ ID NO: 153763 - RNA, 22 nt, synthetic construct
  source 1..22: mol_type = other RNA
tggtcagaaaaatggaatattt

SEQ ID NO: 153764 - RNA, 22 nt, synthetic construct
  source 1..22: mol_type = other RNA
tggtcagagttgtatctgtgat

SEQ ID NO: 153765 - RNA, 22 nt, synthetic construct
  source 1..22: mol_type = other RNA
tggtcagtactatcttccctaa

SEQ ID NO: 153766 - RNA, 22 nt, synthetic construct
  source 1..22: mol_type = other RNA
tggtccacagaggctttttata

SEQ ID NO: 153767 - RNA, 22 nt, synthetic construct
  source 1..22: mol_type = other RNA
tggtccagatgaagcagggaaa

SEQ ID NO: 153768 - RNA, 22 nt, synthetic construct
  source 1..22: mol_type = other RNA
tggtccctgctactcaggagat

SEQ ID NO: 153769 - RNA, 22 nt, synthetic construct
  source 1..22: mol_type = other RNA
tggtcctgaactcgtggcctca

SEQ ID NO: 153770 - RNA, 22 nt, synthetic construct
  source 1..22: mol_type = other RNA
tggtcctgagctttccttagtt

SEQ ID NO: 153771 - RNA, 22 nt, synthetic construct
  source 1..22: mol_type = other RNA
tggtcctgagggctttgtgaag

SEQ ID NO: 153772 - RNA, 22 nt, synthetic construct
  source 1..22: mol_type = other RNA
tggtcctgcatatgtttttatt

SEQ ID NO: 153773 - RNA, 22 nt, synthetic construct
  source 1..22: mol_type = other RNA
tggtcctggaaaaagaccataa

SEQ ID NO: 153774 - RNA, 22 nt, synthetic construct
  source 1..22: mol_type = other RNA
tggtccttaaatttctaaggtt

SEQ ID NO: 153775 - RNA, 22 nt, synthetic construct
  source 1..22: mol_type = other RNA
tggtccttgctgaagaataact

SEQ ID NO: 153776 - RNA, 22 nt, synthetic construct
  source 1..22: mol_type = other RNA
tggtccttttttactgactttt

SEQ ID NO: 153777 - RNA, 22 nt, synthetic construct
  source 1..22: mol_type = other RNA
tggtcgaaaacctgaaatggct

SEQ ID NO: 153778 - RNA, 22 nt, synthetic construct
  source 1..22: mol_type = other RNA
tggtcgagctgggtgatgttca

SEQ ID NO: 153779 - RNA, 22 nt, synthetic construct
  source 1..22: mol_type = other RNA
tggtctaccatgttgttctttt

SEQ ID NO: 153780 - RNA, 22 nt, synthetic construct
  source 1..22: mol_type = other RNA
tggtctatctcattataacata

SEQ ID NO: 153781 - RNA, 22 nt, synthetic construct
  source 1..22: mol_type = other RNA
tggtctcaaactccaagtctca

SEQ ID NO: 153782 - RNA, 22 nt, synthetic construct
  source 1..22: mol_type = other RNA
tggtctcaatctcctgatccac

SEQ ID NO: 153783 - RNA, 22 nt, synthetic construct
  source 1..22: mol_type = other RNA
tggtctcaccctcaggactctg

SEQ ID NO: 153784 - RNA, 22 nt, synthetic construct
  source 1..22: mol_type = other RNA
tggtctcagctcctcagaaggc

SEQ ID NO: 153785 - RNA, 22 nt, synthetic construct
  source 1..22: mol_type = other RNA
tggtctcattcactagacacat

SEQ ID NO: 153786 - RNA, 22 nt, synthetic construct
  source 1..22: mol_type = other RNA
tggtctcccagcatgaagccct

SEQ ID NO: 153787 - RNA, 22 nt, synthetic construct
  source 1..22: mol_type = other RNA
tggtctcctttctatacttcat

SEQ ID NO: 153788 - RNA, 22 nt, synthetic construct
  source 1..22: mol_type = other RNA
tggtctcgaactctcgacctcg

SEQ ID NO: 153789 - RNA, 22 nt, synthetic construct
  source 1..22: mol_type = other RNA
tggtctcgagctcctgacctca

SEQ ID NO: 153790 - RNA, 22 nt, synthetic construct
  source 1..22: mol_type = other RNA
tggtctcttcgagggggctgag

SEQ ID NO: 153791 - RNA, 22 nt, synthetic construct
  source 1..22: mol_type = other RNA
tggtctgcagactcttgtcccg

SEQ ID NO: 153792 - RNA, 22 nt, synthetic construct
  source 1..22: mol_type = other RNA
tggtctggaatgtgtagttctg

SEQ ID NO: 153793 - RNA, 22 nt, synthetic construct
  source 1..22: mol_type = other RNA
tggtctgggtgatatctgtaag

SEQ ID NO: 153794 - RNA, 22 nt, synthetic construct
  source 1..22: mol_type = other RNA
tggtcttaagagactctcaaga

SEQ ID NO: 153795 - RNA, 22 nt, synthetic construct
  source 1..22: mol_type = other RNA
tggtcttaccctctagctcccc

SEQ ID NO: 153796 - RNA, 22 nt, synthetic construct
  source 1..22: mol_type = other RNA
tggtcttgtactcccagcctca

SEQ ID NO: 153797 - RNA, 22 nt, synthetic construct
  source 1..22: mol_type = other RNA
tggtcttgtctcaacctttgcc

SEQ ID NO: 153798 - RNA, 22 nt, synthetic construct
  source 1..22: mol_type = other RNA
tggtctttctcccaggtcagta

SEQ ID NO: 153799 - RNA, 22 nt, synthetic construct
  source 1..22: mol_type = other RNA
tggtctttttccaggaccaatt

SEQ ID NO: 153800 - RNA, 22 nt, synthetic construct
  source 1..22: mol_type = other RNA
tggtgaaaaaatggtgcagcca

SEQ ID NO: 153801 - RNA, 22 nt, synthetic construct
  source 1..22: mol_type = other RNA
tggtgaactgggtgtaggggga

SEQ ID NO: 153802 - RNA, 22 nt, synthetic construct
  source 1..22: mol_type = other RNA
tggtgaagaatgtgaaaaattt

SEQ ID NO: 153803 - RNA, 22 nt, synthetic construct
  source 1..22: mol_type = other RNA
tggtgaagagagcctgtggtct

SEQ ID NO: 153804 - RNA, 22 nt, synthetic construct
  source 1..22: mol_type = other RNA
tggtgaaggttcatgaacataa

SEQ ID NO: 153805 - RNA, 22 nt, synthetic construct
  source 1..22: mol_type = other RNA
tggtgaatctgagtaaagggta

SEQ ID NO: 153806 - RNA, 22 nt, synthetic construct
  source 1..22: mol_type = other RNA
tggtgactgaattcccacaaaa

SEQ ID NO: 153807 - RNA, 22 nt, synthetic construct
  source 1..22: mol_type = other RNA
tggtgagaacccagtgtctgct

SEQ ID NO: 153808 - RNA, 22 nt, synthetic construct
  source 1..22: mol_type = other RNA
tggtgataactggtgctttttt

SEQ ID NO: 153809 - RNA, 22 nt, synthetic construct
  source 1..22: mol_type = other RNA
tggtgatacctcttactaaaaa

SEQ ID NO: 153810 - RNA, 22 nt, synthetic construct
  source 1..22: mol_type = other RNA
tggtgatcctaagccatctaat

SEQ ID NO: 153811 - RNA, 22 nt, synthetic construct
  source 1..22: mol_type = other RNA
tggtgatctatgaatttgccta

SEQ ID NO: 153812 - RNA, 22 nt, synthetic construct
  source 1..22: mol_type = other RNA
tggtgatgctaacgtgcttgct

SEQ ID NO: 153813 - RNA, 22 nt, synthetic construct
  source 1..22: mol_type = other RNA
tggtgcaaggataaacaaagag

SEQ ID NO: 153814 - RNA, 22 nt, synthetic construct
  source 1..22: mol_type = other RNA
tggtgcaatcacggctgattat

SEQ ID NO: 153815 - RNA, 22 nt, synthetic construct
  source 1..22: mol_type = other RNA
tggtgcaatgataggtcactgc

SEQ ID NO: 153816 - RNA, 22 nt, synthetic construct
  source 1..22: mol_type = other RNA
tggtgcagccactatagaaaat

SEQ ID NO: 153817 - RNA, 22 nt, synthetic construct
  source 1..22: mol_type = other RNA
tggtgcaggccagatatccata

SEQ ID NO: 153818 - RNA, 22 nt, synthetic construct
  source 1..22: mol_type = other RNA
tggtgcatttgggacagcctag

SEQ ID NO: 153819 - RNA, 22 nt, synthetic construct
  source 1..22: mol_type = other RNA
tggtgctgataaatggcttttt

SEQ ID NO: 153820 - RNA, 22 nt, synthetic construct
  source 1..22: mol_type = other RNA
tggtgctgatttaaaattttgc

SEQ ID NO: 153821 - RNA, 22 nt, synthetic construct
  source 1..22: mol_type = other RNA
tggtgctgcacgtctgtggtct

SEQ ID NO: 153822 - RNA, 22 nt, synthetic construct
  source 1..22: mol_type = other RNA
tggtgctggactggagggatgc

SEQ ID NO: 153823 - RNA, 22 nt, synthetic construct
  source 1..22: mol_type = other RNA
tggtgctggcagccttctctct

SEQ ID NO: 153824 - RNA, 22 nt, synthetic construct
  source 1..22: mol_type = other RNA
tggtgcttaattcaaacaaatc

SEQ ID NO: 153825 - RNA, 22 nt, synthetic construct
  source 1..22: mol_type = other RNA
tggtgcttagctgcctcttcct

SEQ ID NO: 153826 - RNA, 22 nt, synthetic construct
  source 1..22: mol_type = other RNA
tggtgcttccttctcttatact

SEQ ID NO: 153827 - RNA, 22 nt, synthetic construct
  source 1..22: mol_type = other RNA
tggtgcttgaactgctggtctg

SEQ ID NO: 153828 - RNA, 22 nt, synthetic construct
  source 1..22: mol_type = other RNA
tggtgctttctatctctcagat

SEQ ID NO: 153829 - RNA, 22 nt, synthetic construct
  source 1..22: mol_type = other RNA
tggtgcttttgctgcatcccaa

SEQ ID NO: 153830 - RNA, 22 nt, synthetic construct
  source 1..22: mol_type = other RNA
tggtgcttttttggtgtttttc

SEQ ID NO: 153831 - RNA, 22 nt, synthetic construct
  source 1..22: mol_type = other RNA
tggtggacaaaaaacgcggcac

SEQ ID NO: 153832 - RNA, 22 nt, synthetic construct
  source 1..22: mol_type = other RNA
tggtggagtattctagttctag

SEQ ID NO: 153833 - RNA, 22 nt, synthetic construct
  source 1..22: mol_type = other RNA
tggtggatagagagattcaaga

SEQ ID NO: 153834 - RNA, 22 nt, synthetic construct
  source 1..22: mol_type = other RNA
tggtggcccacacctgcaatca

SEQ ID NO: 153835 - RNA, 22 nt, synthetic construct
  source 1..22: mol_type = other RNA
tggtggcggatgccggtaatca

SEQ ID NO: 153836 - RNA, 22 nt, synthetic construct
  source 1..22: mol_type = other RNA
tggtgggagaggcatgccggga

SEQ ID NO: 153837 - RNA, 22 nt, synthetic construct
  source 1..22: mol_type = other RNA
tggtgggatctctgggctcact

SEQ ID NO: 153838 - RNA, 22 nt, synthetic construct
  source 1..22: mol_type = other RNA
tggtgggccttgcaagccacat

SEQ ID NO: 153839 - RNA, 22 nt, synthetic construct
  source 1..22: mol_type = other RNA
tggtgggctttgagaaaggttt

SEQ ID NO: 153840 - RNA, 22 nt, synthetic construct
  source 1..22: mol_type = other RNA
tggtgggttcatgccattctcc

SEQ ID NO: 153841 - RNA, 22 nt, synthetic construct
  source 1..22: mol_type = other RNA
tggtggtaactgatgtgaggat

SEQ ID NO: 153842 - RNA, 22 nt, synthetic construct
  source 1..22: mol_type = other RNA
tggtggtaggtgtgtgtaatcc

SEQ ID NO: 153843 - RNA, 22 nt, synthetic construct
  source 1..22: mol_type = other RNA
tggtggtagtaaggatcgttag

SEQ ID NO: 153844 - RNA, 22 nt, synthetic construct
  source 1..22: mol_type = other RNA
tggtggtatgcactgtactcct

SEQ ID NO: 153845 - RNA, 22 nt, synthetic construct
  source 1..22: mol_type = other RNA
tggtggtctcaccctcaggact

SEQ ID NO: 153846 - RNA, 22 nt, synthetic construct
  source 1..22: mol_type = other RNA
tggtgtaaaatacaacagcacc

SEQ ID NO: 153847 - RNA, 22 nt, synthetic construct
  source 1..22: mol_type = other RNA
tggtgtcatttttaagaaatcg

SEQ ID NO: 153848 - RNA, 22 nt, synthetic construct
  source 1..22: mol_type = other RNA
tggtgtccttctgagaaggcga

SEQ ID NO: 153849 - RNA, 22 nt, synthetic construct
  source 1..22: mol_type = other RNA
tggtgtcgtttatttcttctcc

SEQ ID NO: 153850 - RNA, 22 nt, synthetic construct
  source 1..22: mol_type = other RNA
tggtgtgaagttgggcttaaca

SEQ ID NO: 153851 - RNA, 22 nt, synthetic construct
  source 1..22: mol_type = other RNA
tggtgtgatctctgctcaccgc

SEQ ID NO: 153852 - RNA, 22 nt, synthetic construct
  source 1..22: mol_type = other RNA
tggtgtgctcttttcatcactc

SEQ ID NO: 153853 - RNA, 22 nt, synthetic construct
  source 1..22: mol_type = other RNA
tggtgtgcttctgataggaata

SEQ ID NO: 153854 - RNA, 22 nt, synthetic construct
  source 1..22: mol_type = other RNA
tggtgtggcatgtctgtagtta

SEQ ID NO: 153855 - RNA, 22 nt, synthetic construct
  source 1..22: mol_type = other RNA
tggtgtggtcttgtctcaacct

SEQ ID NO: 153856 - RNA, 22 nt, synthetic construct
  source 1..22: mol_type = other RNA
tggtgtgtctgcgccttaaagc

SEQ ID NO: 153857 - RNA, 22 nt, synthetic construct
  source 1..22: mol_type = other RNA
tggtgtgtgactgtagtccctg

SEQ ID NO: 153858 - RNA, 22 nt, synthetic construct
  source 1..22: mol_type = other RNA
tggtgtgtgcaaaggattagaa

SEQ ID NO: 153859 - RNA, 22 nt, synthetic construct
  source 1..22: mol_type = other RNA
tggtgttaggcaatccttccgc

SEQ ID NO: 153860 - RNA, 22 nt, synthetic construct
  source 1..22: mol_type = other RNA
tggtgttatttgttctgtcacg

SEQ ID NO: 153861 - RNA, 22 nt, synthetic construct
  source 1..22: mol_type = other RNA
tggtgttgactgaattaatctc

SEQ ID NO: 153862 - RNA, 22 nt, synthetic construct
  source 1..22: mol_type = other RNA
tggtgttgcttgctctacaaac

SEQ ID NO: 153863 - RNA, 22 nt, synthetic construct
  source 1..22: mol_type = other RNA
tggtgtttctgacaggtggtat

SEQ ID NO: 153864 - RNA, 22 nt, synthetic construct
  source 1..22: mol_type = other RNA
tggtgtttttctaggtagtttc

SEQ ID NO: 153865 - RNA, 22 nt, synthetic construct
  source 1..22: mol_type = other RNA
tggttaaacttggtctgggtga

SEQ ID NO: 153866 - RNA, 22 nt, synthetic construct
  source 1..22: mol_type = other RNA
tggttaagactgctgtttacca

SEQ ID NO: 153867 - RNA, 22 nt, synthetic construct
  source 1..22: mol_type = other RNA
tggttaatagtgaccctttgaa

SEQ ID NO: 153868 - RNA, 22 nt, synthetic construct
  source 1..22: mol_type = other RNA
tggttagactgcacataaaagg

SEQ ID NO: 153869 - RNA, 22 nt, synthetic construct
  source 1..22: mol_type = other RNA
tggttaggaaaatacatgaggc

SEQ ID NO: 153870 - RNA, 22 nt, synthetic construct
  source 1..22: mol_type = other RNA
tggttagggagactttcactgc

SEQ ID NO: 153871 - RNA, 22 nt, synthetic construct
  source 1..22: mol_type = other RNA
tggttagtgttgtttttaaaca

SEQ ID NO: 153872 - RNA, 22 nt, synthetic construct
  source 1..22: mol_type = other RNA
tggttatagccataagagtccc

SEQ ID NO: 153873 - RNA, 22 nt, synthetic construct
  source 1..22: mol_type = other RNA
tggttatgcgaatttactttta

SEQ ID NO: 153874 - RNA, 22 nt, synthetic construct
  source 1..22: mol_type = other RNA
tggttattcatgtttgtggttt

SEQ ID NO: 153875 - RNA, 22 nt, synthetic construct
  source 1..22: mol_type = other RNA
tggttattgagtctgtagggtg

SEQ ID NO: 153876 - RNA, 22 nt, synthetic construct
  source 1..22: mol_type = other RNA
tggttcaagctatgctcctgcc

SEQ ID NO: 153877 - RNA, 22 nt, synthetic construct
  source 1..22: mol_type = other RNA
tggttcacacctgtagtcccag

SEQ ID NO: 153878 - RNA, 22 nt, synthetic construct
  source 1..22: mol_type = other RNA
tggttcacttgaaacctgccat

SEQ ID NO: 153879 - RNA, 22 nt, synthetic construct
  source 1..22: mol_type = other RNA
tggttcataatatatcacaact

SEQ ID NO: 153880 - RNA, 22 nt, synthetic construct
  source 1..22: mol_type = other RNA
tggttcatatttcccttttgga

SEQ ID NO: 153881 - RNA, 22 nt, synthetic construct
  source 1..22: mol_type = other RNA
tggttcatttcaggaatgcaaa

SEQ ID NO: 153882 - RNA, 22 nt, synthetic construct
  source 1..22: mol_type = other RNA
tggttccaaacttctgaccttg

SEQ ID NO: 153883 - RNA, 22 nt, synthetic construct
  source 1..22: mol_type = other RNA
tggttccatttgttttgtgttt

SEQ ID NO: 153884 - RNA, 22 nt, synthetic construct
  source 1..22: mol_type = other RNA
tggttcctagaaaatttaatac

SEQ ID NO: 153885 - RNA, 22 nt, synthetic construct
  source 1..22: mol_type = other RNA
tggttcgtttgaggcttttcat

SEQ ID NO: 153886 - RNA, 22 nt, synthetic construct
  source 1..22: mol_type = other RNA
tggttctgcctaatctctaggc

SEQ ID NO: 153887 - RNA, 22 nt, synthetic construct
  source 1..22: mol_type = other RNA
tggttctgcgtgttattttaat

SEQ ID NO: 153888 - RNA, 22 nt, synthetic construct
  source 1..22: mol_type = other RNA
tggttctgtgctagatgctaaa

SEQ ID NO: 153889 - RNA, 22 nt, synthetic construct
  source 1..22: mol_type = other RNA
tggttgaagaaagtaggaatta

SEQ ID NO: 153890 - RNA, 22 nt, synthetic construct
  source 1..22: mol_type = other RNA
tggttgacccataaactgaaca

SEQ ID NO: 153891 - RNA, 22 nt, synthetic construct
  source 1..22: mol_type = other RNA
tggttgcacaatgttgtggatg

SEQ ID NO: 153892 - RNA, 22 nt, synthetic construct
  source 1..22: mol_type = other RNA
tggttggaaaacttttaactga

SEQ ID NO: 153893 - RNA, 22 nt, synthetic construct
  source 1..22: mol_type = other RNA
tggttggaaaagaaagctgtgg

SEQ ID NO: 153894 - RNA, 22 nt, synthetic construct
  source 1..22: mol_type = other RNA
tggttggaagtttctggaagtt

SEQ ID NO: 153895 - RNA, 22 nt, synthetic construct
  source 1..22: mol_type = other RNA
tggttggactccaccctgcccc

SEQ ID NO: 153896 - RNA, 22 nt, synthetic construct
  source 1..22: mol_type = other RNA
tggttggccgaggccagtccct

SEQ ID NO: 153897 - RNA, 22 nt, synthetic construct
  source 1..22: mol_type = other RNA
tggttgtgcttcgaggtcgcac

SEQ ID NO: 153898 - RNA, 22 nt, synthetic construct
  source 1..22: mol_type = other RNA
tggttgtggaattaactccagg

SEQ ID NO: 153899 - RNA, 22 nt, synthetic construct
  source 1..22: mol_type = other RNA
tggttgttggctaaaagaccgc

SEQ ID NO: 153900 - RNA, 22 nt, synthetic construct
  source 1..22: mol_type = other RNA
tggtttaacacatacaaaccaa

SEQ ID NO: 153901 - RNA, 22 nt, synthetic construct
  source 1..22: mol_type = other RNA
tggtttaaggtaagggtccagc

SEQ ID NO: 153902 - RNA, 22 nt, synthetic construct
  source 1..22: mol_type = other RNA
tggtttacaatggttcataata

SEQ ID NO: 153903 - RNA, 22 nt, synthetic construct
  source 1..22: mol_type = other RNA
tggtttaggctgtctccaacgc

SEQ ID NO: 153904 - RNA, 22 nt, synthetic construct
  source 1..22: mol_type = other RNA
tggtttattcatataatggagt

SEQ ID NO: 153905 - RNA, 22 nt, synthetic construct
  source 1..22: mol_type = other RNA
tggtttattttctgcatttggt

SEQ ID NO: 153906 - RNA, 22 nt, synthetic construct
  source 1..22: mol_type = other RNA
tggtttcacacgcattgcattg

SEQ ID NO: 153907 - RNA, 22 nt, synthetic construct
  source 1..22: mol_type = other RNA
tggtttcagtacacgaaaatat

SEQ ID NO: 153908 - RNA, 22 nt, synthetic construct
  source 1..22: mol_type = other RNA
tggtttcagtccctcctttcta

SEQ ID NO: 153909 - RNA, 22 nt, synthetic construct
  source 1..22: mol_type = other RNA
tggtttcataaaatgatggcaa

SEQ ID NO: 153910 - RNA, 22 nt, synthetic construct
  source 1..22: mol_type = other RNA
tggtttctccttctgcaggctg

SEQ ID NO: 153911 - RNA, 22 nt, synthetic construct
  source 1..22: mol_type = other RNA
tggtttctgacacccgacccac

SEQ ID NO: 153912 - RNA, 22 nt, synthetic construct
  source 1..22: mol_type = other RNA
tggtttctgcatacttagctaa

SEQ ID NO: 153913 - RNA, 22 nt, synthetic construct
  source 1..22: mol_type = other RNA
tggtttcttcaagatactgcac

SEQ ID NO: 153914 - RNA, 22 nt, synthetic construct
  source 1..22: mol_type = other RNA
tggtttcttgaatctctctatc

SEQ ID NO: 153915 - RNA, 22 nt, synthetic construct
  source 1..22: mol_type = other RNA
tggtttgaaatgatcttttgta

SEQ ID NO: 153916 - RNA, 22 nt, synthetic construct
  source 1..22: mol_type = other RNA
tggtttgaaccccagaaggtta

SEQ ID NO: 153917 - RNA, 22 nt, synthetic construct
  source 1..22: mol_type = other RNA
tggtttgaagcttcacttctct

SEQ ID NO: 153918 - RNA, 22 nt, synthetic construct
  source 1..22: mol_type = other RNA
tggtttgatcccactagtggaa

SEQ ID NO: 153919 - RNA, 22 nt, synthetic construct
  source 1..22: mol_type = other RNA
tggtttgattgttccagggggg

SEQ ID NO: 153920 - RNA, 22 nt, synthetic construct
  source 1..22: mol_type = other RNA
tggtttgcaaaaattttgttca

SEQ ID NO: 153921 - RNA, 22 nt, synthetic construct
  source 1..22: mol_type = other RNA
tggtttgccttttcactcttag

SEQ ID NO: 153922 - RNA, 22 nt, synthetic construct
  source 1..22: mol_type = other RNA
tggtttgctttggagtcacagt

SEQ ID NO: 153923 - RNA, 22 nt, synthetic construct
  source 1..22: mol_type = other RNA
tggtttggggcttttgaacact

SEQ ID NO: 153924 - RNA, 22 nt, synthetic construct
  source 1..22: mol_type = other RNA
tggtttgtatgtgttaaaccat

SEQ ID NO: 153925 - RNA, 22 nt, synthetic construct
  source 1..22: mol_type = other RNA
tggtttgtgtgtttgtgaaaaa

SEQ ID NO: 153926 - RNA, 22 nt, synthetic construct
  source 1..22: mol_type = other RNA
tggttttaacctcttgaagtca

SEQ ID NO: 153927 - RNA, 22 nt, synthetic construct
  source 1..22: mol_type = other RNA
tggttttaatgggcattagaag

SEQ ID NO: 153928 - RNA, 22 nt, synthetic construct
  source 1..22: mol_type = other RNA
tggttttactactgtactgttt

SEQ ID NO: 153929 - RNA, 22 nt, synthetic construct
  source 1..22: mol_type = other RNA
tggttttatggtaactcctgtt

SEQ ID NO: 153930 - RNA, 22 nt, synthetic construct
  source 1..22: mol_type = other RNA
tggttttcctactaacaagaaa

SEQ ID NO: 153931 - RNA, 22 nt, synthetic construct
  source 1..22: mol_type = other RNA
tggttttcctgatggacattct

SEQ ID NO: 153932 - RNA, 22 nt, synthetic construct
  source 1..22: mol_type = other RNA
tggttttctggaggctagaagt

SEQ ID NO: 153933 - RNA, 22 nt, synthetic construct
  source 1..22: mol_type = other RNA
tggttttgactcagtacttccc

SEQ ID NO: 153934 - RNA, 22 nt, synthetic construct
  source 1..22: mol_type = other RNA
tggttttgatcatcgcattacg

SEQ ID NO: 153935 - RNA, 22 nt, synthetic construct
  source 1..22: mol_type = other RNA
tggtttttatggaataatggaa

SEQ ID NO: 153936 - RNA, 22 nt, synthetic construct
  source 1..22: mol_type = other RNA
tggtttttggttcacttgaaac

SEQ ID NO: 153937 - RNA, 22 nt, synthetic construct
  source 1..22: mol_type = other RNA
tggttttttcccccctggaaca

SEQ ID NO: 153938 - RNA, 22 nt, synthetic construct
  source 1..22: mol_type = other RNA
tgtaaaaactgtttggctggga

SEQ ID NO: 153939 - RNA, 22 nt, synthetic construct
  source 1..22: mol_type = other RNA
tgtaaaaatatagaaggccaga

SEQ ID NO: 153940 - RNA, 22 nt, synthetic construct
  source 1..22: mol_type = other RNA
tgtaaaaattttctcccaaggt

SEQ ID NO: 153941 - RNA, 22 nt, synthetic construct
  source 1..22: mol_type = other RNA
tgtaaaacagacccttatgtcc

SEQ ID NO: 153942 - RNA, 22 nt, synthetic construct
  source 1..22: mol_type = other RNA
tgtaaaacatcaaagtcccctg

SEQ ID NO: 153943 - RNA, 22 nt, synthetic construct
  source 1..22: mol_type = other RNA
tgtaaaacatctggaaggaaac

SEQ ID NO: 153944 - RNA, 22 nt, synthetic construct
  source 1..22: mol_type = other RNA
tgtaaaaggctaattttttctg

SEQ ID NO: 153945 - RNA, 22 nt, synthetic construct
  source 1..22: mol_type = other RNA
tgtaaaatacaacagcaccttt

SEQ ID NO: 153946 - RNA, 22 nt, synthetic construct
  source 1..22: mol_type = other RNA
tgtaaacaatgctgctatgaaa

SEQ ID NO: 153947 - RNA, 22 nt, synthetic construct
  source 1..22: mol_type = other RNA
tgtaaacactgttctgcgtggt

SEQ ID NO: 153948 - RNA, 22 nt, synthetic construct
  source 1..22: mol_type = other RNA
tgtaaacagcatactgtggata

SEQ ID NO: 153949 - RNA, 22 nt, synthetic construct
  source 1..22: mol_type = other RNA
tgtaaacatgaacaagttacaa

SEQ ID NO: 153950 - RNA, 22 nt, synthetic construct
  source 1..22: mol_type = other RNA
tgtaaaccatatggttaatagt

SEQ ID NO: 153951 - RNA, 22 nt, synthetic construct
  source 1..22: mol_type = other RNA
tgtaaacctggaatcctctacc

SEQ ID NO: 153952 - RNA, 22 nt, synthetic construct
  source 1..22: mol_type = other RNA
tgtaaactgttggaaaaatcgt

SEQ ID NO: 153953 - RNA, 22 nt, synthetic construct
  source 1..22: mol_type = other RNA
tgtaaagtaatcaagtgaaatg

SEQ ID NO: 153954 - RNA, 22 nt, synthetic construct
  source 1..22: mol_type = other RNA
tgtaaagtttctctctccctgc

SEQ ID NO: 153955 - RNA, 22 nt, synthetic construct
  source 1..22: mol_type = other RNA
tgtaaatgaaacacttgtgtaa

SEQ ID NO: 153956 - RNA, 22 nt, synthetic construct
  source 1..22: mol_type = other RNA
tgtaaattcctaactcaagagt

SEQ ID NO: 153957 - RNA, 22 nt, synthetic construct
  source 1..22: mol_type = other RNA
tgtaaattctgccacattcaac

SEQ ID NO: 153958 - RNA, 22 nt, synthetic construct
  source 1..22: mol_type = other RNA
tgtaacaaagatgccacaaatg

SEQ ID NO: 153959 - RNA, 22 nt, synthetic construct
  source 1..22: mol_type = other RNA
tgtaacacagttctagttctaa

SEQ ID NO: 153960 - RNA, 22 nt, synthetic construct
  source 1..22: mol_type = other RNA
tgtaacacatatttatcaacac

SEQ ID NO: 153961 - RNA, 22 nt, synthetic construct
  source 1..22: mol_type = other RNA
tgtaacagaggcatgcacggac

SEQ ID NO: 153962 - RNA, 22 nt, synthetic construct
  source 1..22: mol_type = other RNA
tgtaacatacacatcagatttt

SEQ ID NO: 153963 - RNA, 22 nt, synthetic construct
  source 1..22: mol_type = other RNA
tgtaacatgttagattaggaaa

SEQ ID NO: 153964 - RNA, 22 nt, synthetic construct
  source 1..22: mol_type = other RNA
tgtaaccctgtttcccttaatg

SEQ ID NO: 153965 - RNA, 22 nt, synthetic construct
  source 1..22: mol_type = other RNA
tgtaacctccacctcccagatt

SEQ ID NO: 153966 - RNA, 22 nt, synthetic construct
  source 1..22: mol_type = other RNA
tgtaactacagacatgccacac

SEQ ID NO: 153967 - RNA, 22 nt, synthetic construct
  source 1..22: mol_type = other RNA
tgtaactaccactgaggtcaag

SEQ ID NO: 153968 - RNA, 22 nt, synthetic construct
  source 1..22: mol_type = other RNA
tgtaactgacttcaagaggtta

SEQ ID NO: 153969 - RNA, 22 nt, synthetic construct
  source 1..22: mol_type = other RNA
tgtaacttgaattcagatggcc

SEQ ID NO: 153970 - RNA, 22 nt, synthetic construct
  source 1..22: mol_type = other RNA
tgtaacttgcttaggctgaagc

SEQ ID NO: 153971 - RNA, 22 nt, synthetic construct
  source 1..22: mol_type = other RNA
tgtaacttgttcatgtttacag

SEQ ID NO: 153972 - RNA, 22 nt, synthetic construct
  source 1..22: mol_type = other RNA
tgtaagaaatgccacatttttt

SEQ ID NO: 153973 - RNA, 22 nt, synthetic construct
  source 1..22: mol_type = other RNA
tgtaagacaatgtctttggctc

SEQ ID NO: 153974 - RNA, 22 nt, synthetic construct
  source 1..22: mol_type = other RNA
tgtaagagattaattcagtcaa

SEQ ID NO: 153975 - RNA, 22 nt, synthetic construct
  source 1..22: mol_type = other RNA
tgtaagcacacatgaacctgca

SEQ ID NO: 153976 - RNA, 22 nt, synthetic construct
  source 1..22: mol_type = other RNA
tgtaagcacctgtataaataaa

SEQ ID NO: 153977 - RNA, 22 nt, synthetic construct
  source 1..22: mol_type = other RNA
tgtaagctgaactctgtggagt

SEQ ID NO: 153978 - RNA, 22 nt, synthetic construct
  source 1..22: mol_type = other RNA
tgtaagctggtaatacagtctg

SEQ ID NO: 153979 - RNA, 22 nt, synthetic construct
  source 1..22: mol_type = other RNA
tgtaaggtgcacgctgtgaatg

SEQ ID NO: 153980 - RNA, 22 nt, synthetic construct
  source 1..22: mol_type = other RNA
tgtaaggtgtttggtgaatttt

SEQ ID NO: 153981 - RNA, 22 nt, synthetic construct
  source 1..22: mol_type = other RNA
tgtaagtcagttaacagtgctg

SEQ ID NO: 153982 - RNA, 22 nt, synthetic construct
  source 1..22: mol_type = other RNA
tgtaagtcatcaaaggaaggaa

SEQ ID NO: 153983 - RNA, 22 nt, synthetic construct
  source 1..22: mol_type = other RNA
tgtaagtgggaggaggtcatac

SEQ ID NO: 153984 - RNA, 22 nt, synthetic construct
  source 1..22: mol_type = other RNA
tgtaagttcctggactgtgatg

SEQ ID NO: 153985 - RNA, 22 nt, synthetic construct
  source 1..22: mol_type = other RNA
tgtaagttggattcccaggtat

SEQ ID NO: 153986 - RNA, 22 nt, synthetic construct
  source 1..22: mol_type = other RNA
tgtaataacttggagaacttaa

SEQ ID NO: 153987 - RNA, 22 nt, synthetic construct
  source 1..22: mol_type = other RNA
tgtaatatacttgtcaagttct

SEQ ID NO: 153988 - RNA, 22 nt, synthetic construct
  source 1..22: mol_type = other RNA
tgtaatattaaccaagaacaac

SEQ ID NO: 153989 - RNA, 22 nt, synthetic construct
  source 1..22: mol_type = other RNA
tgtaatattgtatatacccttc

SEQ ID NO: 153990 - RNA, 22 nt, synthetic construct
  source 1..22: mol_type = other RNA
tgtaatcaagtatctccctgtg

SEQ ID NO: 153991 - RNA, 22 nt, synthetic construct
  source 1..22: mol_type = other RNA
tgtaatcacagtacgcttttat

SEQ ID NO: 153992 - RNA, 22 nt, synthetic construct
  source 1..22: mol_type = other RNA
tgtaatcctgtttctctacatc

SEQ ID NO: 153993 - RNA, 22 nt, synthetic construct
  source 1..22: mol_type = other RNA
tgtaatctaaggattatggcta

SEQ ID NO: 153994 - RNA, 22 nt, synthetic construct
  source 1..22: mol_type = other RNA
tgtaatctcatggaagttattt

SEQ ID NO: 153995 - RNA, 22 nt, synthetic construct
  source 1..22: mol_type = other RNA
tgtaatgacctggaaattattc

SEQ ID NO: 153996 - RNA, 22 nt, synthetic construct
  source 1..22: mol_type = other RNA
tgtaatgagctgagattgcccc

SEQ ID NO: 153997 - RNA, 22 nt, synthetic construct
  source 1..22: mol_type = other RNA
tgtaatggatcaaggcacagtc

SEQ ID NO: 153998 - RNA, 22 nt, synthetic construct
  source 1..22: mol_type = other RNA
tgtaatgtctcctctttcatat

SEQ ID NO: 153999 - RNA, 22 nt, synthetic construct
  source 1..22: mol_type = other RNA
tgtaatgttacttctcagctat

SEQ ID NO: 154000 - RNA, 22 nt, synthetic construct
  source 1..22: mol_type = other RNA
tgtaatgtttgtacttctacct

SEQ ID NO: 154001 - RNA, 22 nt, synthetic construct
  source 1..22: mol_type = other RNA
tgtaattacaggggactttgat

SEQ ID NO: 154002 - RNA, 22 nt, synthetic construct
  source 1..22: mol_type = other RNA
tgtaattacatacttcaaaggg

SEQ ID NO: 154003 - RNA, 22 nt, synthetic construct
  source 1..22: mol_type = other RNA
tgtaattcatcctactagtatt

SEQ ID NO: 154004 - RNA, 22 nt, synthetic construct
  source 1..22: mol_type = other RNA
tgtaattgtaccttggagagaa

SEQ ID NO: 154005 - RNA, 22 nt, synthetic construct
  source 1..22: mol_type = other RNA
tgtaatttttaaaagagcgaag

SEQ ID NO: 154006 - RNA, 22 nt, synthetic construct
  source 1..22: mol_type = other RNA
tgtacaaagatttacccctact

SEQ ID NO: 154007 - RNA, 22 nt, synthetic construct
  source 1..22: mol_type = other RNA
tgtacaacattcatccctctaa

SEQ ID NO: 154008 - RNA, 22 nt, synthetic construct
  source 1..22: mol_type = other RNA
tgtacaatgaattagcaatgcg

SEQ ID NO: 154009 - RNA, 22 nt, synthetic construct
  source 1..22: mol_type = other RNA
tgtacaatggggctttactgta

SEQ ID NO: 154010 - RNA, 22 nt, synthetic construct
  source 1..22: mol_type = other RNA
tgtacaattaggctgtttgaga

SEQ ID NO: 154011 - RNA, 22 nt, synthetic construct
  source 1..22: mol_type = other RNA
tgtacaattcggtggcattaag

SEQ ID NO: 154012 - RNA, 22 nt, synthetic construct
  source 1..22: mol_type = other RNA
tgtacaattttcttacccttta

SEQ ID NO: 154013 - RNA, 22 nt, synthetic construct
  source 1..22: mol_type = other RNA
tgtacacctcaaactagaaaaa

SEQ ID NO: 154014 - RNA, 22 nt, synthetic construct
  source 1..22: mol_type = other RNA
tgtacacgtcttgtcaataatt

SEQ ID NO: 154015 - RNA, 22 nt, synthetic construct
  source 1..22: mol_type = other RNA
tgtacagtaattgtagtttcca

SEQ ID NO: 154016 - RNA, 22 nt, synthetic construct
  source 1..22: mol_type = other RNA
tgtacatgaagtcctcaatcat

SEQ ID NO: 154017 - RNA, 22 nt, synthetic construct
  source 1..22: mol_type = other RNA
tgtacatgacctatctattaac

SEQ ID NO: 154018 - RNA, 22 nt, synthetic construct
  source 1..22: mol_type = other RNA
tgtacatttaaaattgcagagt

SEQ ID NO: 154019 - RNA, 22 nt, synthetic construct
  source 1..22: mol_type = other RNA
tgtacattttaccatatacaca

SEQ ID NO: 154020 - RNA, 22 nt, synthetic construct
  source 1..22: mol_type = other RNA
tgtaccaaaagtcctgttcttt

SEQ ID NO: 154021 - RNA, 22 nt, synthetic construct
  source 1..22: mol_type = other RNA
tgtacccaatggattataaatc

SEQ ID NO: 154022 - RNA, 22 nt, synthetic construct
  source 1..22: mol_type = other RNA
tgtacccattagacactaactt

SEQ ID NO: 154023 - RNA, 22 nt, synthetic construct
  source 1..22: mol_type = other RNA
tgtacccgtgtgttttgttgtt

SEQ ID NO: 154024 - RNA, 22 nt, synthetic construct
  source 1..22: mol_type = other RNA
tgtacccttacgcgtggatgtg

SEQ ID NO: 154025 - RNA, 22 nt, synthetic construct
  source 1..22: mol_type = other RNA
tgtaccttgatttatggcctaa

SEQ ID NO: 154026 - RNA, 22 nt, synthetic construct
  source 1..22: mol_type = other RNA
tgtaccttggagagaaaccttg

SEQ ID NO: 154027 - RNA, 22 nt, synthetic construct
  source 1..22: mol_type = other RNA
tgtacgccaattttcatagcag

SEQ ID NO: 154028 - RNA, 22 nt, synthetic construct
  source 1..22: mol_type = other RNA
tgtactaagcctatgtaagaca

SEQ ID NO: 154029 - RNA, 22 nt, synthetic construct
  source 1..22: mol_type = other RNA
tgtactacctatagaattcttc

SEQ ID NO: 154030 - RNA, 22 nt, synthetic construct
  source 1..22: mol_type = other RNA
tgtactactgacctgggagaaa

SEQ ID NO: 154031 - RNA, 22 nt, synthetic construct
  source 1..22: mol_type = other RNA
tgtactacttgtcaggtgggca

SEQ ID NO: 154032 - RNA, 22 nt, synthetic construct
  source 1..22: mol_type = other RNA
tgtactagtctccatacaagga

SEQ ID NO: 154033 - RNA, 22 nt, synthetic construct
  source 1..22: mol_type = other RNA
tgtactcccagcctcaaacaat

SEQ ID NO: 154034 - RNA, 22 nt, synthetic construct
  source 1..22: mol_type = other RNA
tgtactgaaaccagtgctctcc

SEQ ID NO: 154035 - RNA, 22 nt, synthetic construct
  source 1..22: mol_type = other RNA
tgtactggaagtgtaacataca

SEQ ID NO: 154036 - RNA, 22 nt, synthetic construct
  source 1..22: mol_type = other RNA
tgtactgtgtggcttctcaaac

SEQ ID NO: 154037 - RNA, 22 nt, synthetic construct
  source 1..22: mol_type = other RNA
tgtactgtttagcatctagcac

SEQ ID NO: 154038 - RNA, 22 nt, synthetic construct
  source 1..22: mol_type = other RNA
tgtacttctaccttgaaaatgc

SEQ ID NO: 154039 - RNA, 22 nt, synthetic construct
  source 1..22: mol_type = other RNA
tgtacttgacacaaaggactgg

SEQ ID NO: 154040 - RNA, 22 nt, synthetic construct
  source 1..22: mol_type = other RNA
tgtagaaaatagggacggcctt

SEQ ID NO: 154041 - RNA, 22 nt, synthetic construct
  source 1..22: mol_type = other RNA
tgtagaaatgtggagataaaga

SEQ ID NO: 154042 - RNA, 22 nt, synthetic construct
  source 1..22: mol_type = other RNA
tgtagaaggatatgttttctaa

SEQ ID NO: 154043 - RNA, 22 nt, synthetic construct
  source 1..22: mol_type = other RNA
tgtagaatatccaagcacaaac

SEQ ID NO: 154044 - RNA, 22 nt, synthetic construct
  source 1..22: mol_type = other RNA
tgtagaatgtttttccgtctag

SEQ ID NO: 154045 - RNA, 22 nt, synthetic construct
  source 1..22: mol_type = other RNA
tgtagaccctgttagtccccta

SEQ ID NO: 154046 - RNA, 22 nt, synthetic construct
  source 1..22: mol_type = other RNA
tgtagagaaaatgttatacagc

SEQ ID NO: 154047 - RNA, 22 nt, synthetic construct
  source 1..22: mol_type = other RNA
tgtagagaaacaggattacaat

SEQ ID NO: 154048 - RNA, 22 nt, synthetic construct
  source 1..22: mol_type = other RNA
tgtagagacagaatcttactgg

SEQ ID NO: 154049 - RNA, 22 nt, synthetic construct
  source 1..22: mol_type = other RNA
tgtagagcaagcaacaccagat

SEQ ID NO: 154050 - RNA, 22 nt, synthetic construct
  source 1..22: mol_type = other RNA
tgtagaggaggagggttagatt

SEQ ID NO: 154051 - RNA, 22 nt, synthetic construct
  source 1..22: mol_type = other RNA
tgtagaggcagttgagttttca

SEQ ID NO: 154052 - RNA, 22 nt, synthetic construct
  source 1..22: mol_type = other RNA
tgtagagggaatttgttttacc

SEQ ID NO: 154053 - RNA, 22 nt, synthetic construct
  source 1..22: mol_type = other RNA
tgtagaggtgaagttaagggcc

SEQ ID NO: 154054 - RNA, 22 nt, synthetic construct
  source 1..22: mol_type = other RNA
tgtagatatgggagtccctgct

SEQ ID NO: 154055 - RNA, 22 nt, synthetic construct
  source 1..22: mol_type = other RNA
tgtagatattttctgtcattct

SEQ ID NO: 154056 - RNA, 22 nt, synthetic construct
  source 1..22: mol_type = other RNA
tgtagatcaagtatttcctatg

SEQ ID NO: 154057 - RNA, 22 nt, synthetic construct
  source 1..22: mol_type = other RNA
tgtagatcctgaggaagctaat

SEQ ID NO: 154058 - RNA, 22 nt, synthetic construct
  source 1..22: mol_type = other RNA
tgtagattgggcttttcatata

SEQ ID NO: 154059 - RNA, 22 nt, synthetic construct
  source 1..22: mol_type = other RNA
tgtagattgttttaggtagtct

SEQ ID NO: 154060 - RNA, 22 nt, synthetic construct
  source 1..22: mol_type = other RNA
tgtagcagacactgggttctca

SEQ ID NO: 154061 - RNA, 22 nt, synthetic construct
  source 1..22: mol_type = other RNA
tgtagcattgaagtatagtttg

SEQ ID NO: 154062 - RNA, 22 nt, synthetic construct
  source 1..22: mol_type = other RNA
tgtagccacaagccacatgtgg

SEQ ID NO: 154063 - RNA, 22 nt, synthetic construct
  source 1..22: mol_type = other RNA
tgtagcgggaaaaaataatatg

SEQ ID NO: 154064 - RNA, 22 nt, synthetic construct
  source 1..22: mol_type = other RNA
tgtagctaatatctttggggag

SEQ ID NO: 154065 - RNA, 22 nt, synthetic construct
  source 1..22: mol_type = other RNA
tgtagctatatcccaaattggc

SEQ ID NO: 154066 - RNA, 22 nt, synthetic construct
  source 1..22: mol_type = other RNA
tgtagctcaaagcatatgaatc

SEQ ID NO: 154067 - RNA, 22 nt, synthetic construct
  source 1..22: mol_type = other RNA
tgtagctgggatggctgaaaga

SEQ ID NO: 154068 - RNA, 22 nt, synthetic construct
  source 1..22: mol_type = other RNA
tgtagctgtggctcactcattt

SEQ ID NO: 154069 - RNA, 22 nt, synthetic construct
  source 1..22: mol_type = other RNA
tgtagcttcacgtgcattcata

SEQ ID NO: 154070 - RNA, 22 nt, synthetic construct
  source 1..22: mol_type = other RNA
tgtaggaaactttgcattcctg

SEQ ID NO: 154071 - RNA, 22 nt, synthetic construct
  source 1..22: mol_type = other RNA
tgtaggaaagcctgtgacagta

SEQ ID NO: 154072 - RNA, 22 nt, synthetic construct
  source 1..22: mol_type = other RNA
tgtaggaaggaacacacaccta

SEQ ID NO: 154073 - RNA, 22 nt, synthetic construct
  source 1..22: mol_type = other RNA
tgtaggcacattcaagcagaaa

SEQ ID NO: 154074 - RNA, 22 nt, synthetic construct
  source 1..22: mol_type = other RNA
tgtaggccccgatgccatgtgt

SEQ ID NO: 154075 - RNA, 22 nt, synthetic construct
  source 1..22: mol_type = other RNA
tgtagggaatagacaaagacaa

SEQ ID NO: 154076 - RNA, 22 nt, synthetic construct
  source 1..22: mol_type = other RNA
tgtagggcaccgtgacagaaca

SEQ ID NO: 154077 - RNA, 22 nt, synthetic construct
  source 1..22: mol_type = other RNA
tgtagggggaaaactccaagtg

SEQ ID NO: 154078 - RNA, 22 nt, synthetic construct
  source 1..22: mol_type = other RNA
tgtagggtgactagtgtgaatg

SEQ ID NO: 154079 - RNA, 22 nt, synthetic construct
  source 1..22: mol_type = other RNA
tgtagggtttggcagtttaaga

SEQ ID NO: 154080 - RNA, 22 nt, synthetic construct
  source 1..22: mol_type = other RNA
tgtaggtgtctcatttaataac

SEQ ID NO: 154081 - RNA, 22 nt, synthetic construct
  source 1..22: mol_type = other RNA
tgtaggtgtctgatgtgtgtct

SEQ ID NO: 154082 - RNA, 22 nt, synthetic construct
  source 1..22: mol_type = other RNA
tgtagtcagacacactagctga

SEQ ID NO: 154083 - RNA, 22 nt, synthetic construct
  source 1..22: mol_type = other RNA
tgtagtcagtgaagatgctgaa

SEQ ID NO: 154084 - RNA, 22 nt, synthetic construct
  source 1..22: mol_type = other RNA
tgtagtgagccaaaatcgtgcc

SEQ ID NO: 154085 - RNA, 22 nt, synthetic construct
  source 1..22: mol_type = other RNA
tgtagtgattcacttttgagtt

SEQ ID NO: 154086 - RNA, 22 nt, synthetic construct
  source 1..22: mol_type = other RNA
tgtagtggtgtgtgactgtagt

SEQ ID NO: 154087 - RNA, 22 nt, synthetic construct
  source 1..22: mol_type = other RNA
tgtagtgtcttaatcctatttt

SEQ ID NO: 154088 - RNA, 22 nt, synthetic construct
  source 1..22: mol_type = other RNA
tgtagttacaactactcgggag

SEQ ID NO: 154089 - RNA, 22 nt, synthetic construct
  source 1..22: mol_type = other RNA
tgtagttattattgtcattacc

SEQ ID NO: 154090 - RNA, 22 nt, synthetic construct
  source 1..22: mol_type = other RNA
tgtagttcagtttttctttctt

SEQ ID NO: 154091 - RNA, 22 nt, synthetic construct
  source 1..22: mol_type = other RNA
tgtagttcatcagcataaataa

SEQ ID NO: 154092 - RNA, 22 nt, synthetic construct
  source 1..22: mol_type = other RNA
tgtagttctggtgtcgtttatt

SEQ ID NO: 154093 - RNA, 22 nt, synthetic construct
  source 1..22: mol_type = other RNA
tgtagtttccatggaggggcca

SEQ ID NO: 154094 - RNA, 22 nt, synthetic construct
  source 1..22: mol_type = other RNA
tgtagttttccctgtgtatgtg

SEQ ID NO: 154095 - RNA, 22 nt, synthetic construct
  source 1..22: mol_type = other RNA
tgtagttttggtgtcattttta

SEQ ID NO: 154096 - RNA, 22 nt, synthetic construct
  source 1..22: mol_type = other RNA
tgtataaataaaatgtctggcc

SEQ ID NO: 154097 - RNA, 22 nt, synthetic construct
  source 1..22: mol_type = other RNA
tgtataaatgttcagtttatgg

SEQ ID NO: 154098 - RNA, 22 nt, synthetic construct
  source 1..22: mol_type = other RNA
tgtataaattactgtctgtgaa

SEQ ID NO: 154099 - RNA, 22 nt, synthetic construct
  source 1..22: mol_type = other RNA
tgtataacattttctctacagt

SEQ ID NO: 154100 - RNA, 22 nt, synthetic construct
  source 1..22: mol_type = other RNA
tgtataacccgttttttccttc

SEQ ID NO: 154101 - RNA, 22 nt, synthetic construct
  source 1..22: mol_type = other RNA
tgtatacccaggtgtgagattg

SEQ ID NO: 154102 - RNA, 22 nt, synthetic construct
  source 1..22: mol_type = other RNA
tgtatactgggtgtgatggcgc

SEQ ID NO: 154103 - RNA, 22 nt, synthetic construct
  source 1..22: mol_type = other RNA
tgtatatacccttctgttaata

SEQ ID NO: 154104 - RNA, 22 nt, synthetic construct
  source 1..22: mol_type = other RNA
tgtatatctccttttaagagtg

SEQ ID NO: 154105 - RNA, 22 nt, synthetic construct
  source 1..22: mol_type = other RNA
tgtatatgaaaagcttcccccc

SEQ ID NO: 154106 - RNA, 22 nt, synthetic construct
  source 1..22: mol_type = other RNA
tgtatatgctgtttttgaaaag

SEQ ID NO: 154107 - RNA, 22 nt, synthetic construct
  source 1..22: mol_type = other RNA
tgtatatggtttaaggtaaggg

SEQ ID NO: 154108 - RNA, 22 nt, synthetic construct
  source 1..22: mol_type = other RNA
tgtatcagatgcttctagccaa

SEQ ID NO: 154109 - RNA, 22 nt, synthetic construct
  source 1..22: mol_type = other RNA
tgtatccagtaatcttgctaaa

SEQ ID NO: 154110 - RNA, 22 nt, synthetic construct
  source 1..22: mol_type = other RNA
tgtatcctgagacttaggcaaa

SEQ ID NO: 154111 - RNA, 22 nt, synthetic construct
  source 1..22: mol_type = other RNA
tgtatcctgtttgagaagtctt

SEQ ID NO: 154112 - RNA, 22 nt, synthetic construct
  source 1..22: mol_type = other RNA
tgtatctgtgatccctgatatg

SEQ ID NO: 154113 - RNA, 22 nt, synthetic construct
  source 1..22: mol_type = other RNA
tgtatcttcacaaacaaatcct

SEQ ID NO: 154114 - RNA, 22 nt, synthetic construct
  source 1..22: mol_type = other RNA
tgtatcttttcagtccagatat

SEQ ID NO: 154115 - RNA, 22 nt, synthetic construct
  source 1..22: mol_type = other RNA
tgtatgagaagactggaaaagt

SEQ ID NO: 154116 - RNA, 22 nt, synthetic construct
  source 1..22: mol_type = other RNA
tgtatgatcaaagtgaaaggca

SEQ ID NO: 154117 - RNA, 22 nt, synthetic construct
  source 1..22: mol_type = other RNA
tgtatgatttctaggccctaac

SEQ ID NO: 154118 - RNA, 22 nt, synthetic construct
  source 1..22: mol_type = other RNA
tgtatgattttctaggaaactt

SEQ ID NO: 154119 - RNA, 22 nt, synthetic construct
  source 1..22: mol_type = other RNA
tgtatgcagggaaatcattcag

SEQ ID NO: 154120 - RNA, 22 nt, synthetic construct
  source 1..22: mol_type = other RNA
tgtatgccgctggtgaaaaaat

SEQ ID NO: 154121 - RNA, 22 nt, synthetic construct
  source 1..22: mol_type = other RNA
tgtatggagactagtacactgt

SEQ ID NO: 154122 - RNA, 22 nt, synthetic construct
  source 1..22: mol_type = other RNA
tgtatggttcttaagatgatat

SEQ ID NO: 154123 - RNA, 22 nt, synthetic construct
  source 1..22: mol_type = other RNA
tgtatgtggctcacattgtatt

SEQ ID NO: 154124 - RNA, 22 nt, synthetic construct
  source 1..22: mol_type = other RNA
tgtatgtgtagtcagtgaagat

SEQ ID NO: 154125 - RNA, 22 nt, synthetic construct
  source 1..22: mol_type = other RNA
tgtatgtgttaaaccattcttg

SEQ ID NO: 154126 - RNA, 22 nt, synthetic construct
  source 1..22: mol_type = other RNA
tgtatgttacacttccagtaca

SEQ ID NO: 154127 - RNA, 22 nt, synthetic construct
  source 1..22: mol_type = other RNA
tgtatgtttctcattcttctct

SEQ ID NO: 154128 - RNA, 22 nt, synthetic construct
  source 1..22: mol_type = other RNA
tgtattaccagcttacagcaga

SEQ ID NO: 154129 - RNA, 22 nt, synthetic construct
  source 1..22: mol_type = other RNA
tgtattaggatgtgtacccgtg

SEQ ID NO: 154130 - RNA, 22 nt, synthetic construct
  source 1..22: mol_type = other RNA
tgtattattctaaacacacggg

SEQ ID NO: 154131 - RNA, 22 nt, synthetic construct
  source 1..22: mol_type = other RNA
tgtattatttctgtcatctgaa

SEQ ID NO: 154132 - RNA, 22 nt, synthetic construct
  source 1..22: mol_type = other RNA
tgtattcatccagtttaaagct

SEQ ID NO: 154133 - RNA, 22 nt, synthetic construct
  source 1..22: mol_type = other RNA
tgtattctgacctaaagtttta

SEQ ID NO: 154134 - RNA, 22 nt, synthetic construct
  source 1..22: mol_type = other RNA
tgtattgagtgtagctgtggct

SEQ ID NO: 154135 - RNA, 22 nt, synthetic construct
  source 1..22: mol_type = other RNA
tgtattgcaaactaagtggtat

SEQ ID NO: 154136 - RNA, 22 nt, synthetic construct
  source 1..22: mol_type = other RNA
tgtattgtaccttgatttatgg

SEQ ID NO: 154137 - RNA, 22 nt, synthetic construct
  source 1..22: mol_type = other RNA
tgtattgtaggaaagcctgtga

SEQ ID NO: 154138 - RNA, 22 nt, synthetic construct
  source 1..22: mol_type = other RNA
tgtatttagggagcatatatac

SEQ ID NO: 154139 - RNA, 22 nt, synthetic construct
  source 1..22: mol_type = other RNA
tgtatttccttatagtattacc

SEQ ID NO: 154140 - RNA, 22 nt, synthetic construct
  source 1..22: mol_type = other RNA
tgtatttctgctttggtaccag

SEQ ID NO: 154141 - RNA, 22 nt, synthetic construct
  source 1..22: mol_type = other RNA
tgtatttctgttagatggtgct

SEQ ID NO: 154142 - RNA, 22 nt, synthetic construct
  source 1..22: mol_type = other RNA
tgtattttacaccatgcaggtt

SEQ ID NO: 154143 - RNA, 22 nt, synthetic construct
  source 1..22: mol_type = other RNA
tgtattttcctaaccactgtta

SEQ ID NO: 154144 - RNA, 22 nt, synthetic construct
  source 1..22: mol_type = other RNA
tgtatttttcacaaacacacaa

SEQ ID NO: 154145 - RNA, 22 nt, synthetic construct
  source 1..22: mol_type = other RNA
tgtatttttgctcacacttact

SEQ ID NO: 154146 - RNA, 22 nt, synthetic construct
  source 1..22: mol_type = other RNA
tgtcaaaaagagaacacacaat

SEQ ID NO: 154147 - RNA, 22 nt, synthetic construct
  source 1..22: mol_type = other RNA
tgtcaaaaatgtgtctagtgaa

SEQ ID NO: 154148 - RNA, 22 nt, synthetic construct
  source 1..22: mol_type = other RNA
tgtcaaatttttcacattcttc

SEQ ID NO: 154149 - RNA, 22 nt, synthetic construct
  source 1..22: mol_type = other RNA
tgtcaacattaagggaaacagg

SEQ ID NO: 154150 - RNA, 22 nt, synthetic construct
  source 1..22: mol_type = other RNA
tgtcaactgaggcagagtagag

SEQ ID NO: 154151 - RNA, 22 nt, synthetic construct
  source 1..22: mol_type = other RNA
tgtcaacttttagtaggtctcc

SEQ ID NO: 154152 - RNA, 22 nt, synthetic construct
  source 1..22: mol_type = other RNA
tgtcaagaatgaagtcagagat

SEQ ID NO: 154153 - RNA, 22 nt, synthetic construct
  source 1..22: mol_type = other RNA
tgtcaagctatcagaattttat

SEQ ID NO: 154154 - RNA, 22 nt, synthetic construct
  source 1..22: mol_type = other RNA
tgtcaagctgtttgagctgaaa

SEQ ID NO: 154155 - RNA, 22 nt, synthetic construct
  source 1..22: mol_type = other RNA
tgtcaaggtcatcctttccctt

SEQ ID NO: 154156 - RNA, 22 nt, synthetic construct
  source 1..22: mol_type = other RNA
tgtcaagtacaactaataattg

SEQ ID NO: 154157 - RNA, 22 nt, synthetic construct
  source 1..22: mol_type = other RNA
tgtcaagtgactccaagcacac

SEQ ID NO: 154158 - RNA, 22 nt, synthetic construct
  source 1..22: mol_type = other RNA
tgtcaagttctgatttcaaagt

SEQ ID NO: 154159 - RNA, 22 nt, synthetic construct
  source 1..22: mol_type = other RNA
tgtcaataatttggatgaacgc

SEQ ID NO: 154160 - RNA, 22 nt, synthetic construct
  source 1..22: mol_type = other RNA
tgtcaatggggaactttatttt

SEQ ID NO: 154161 - RNA, 22 nt, synthetic construct
  source 1..22: mol_type = other RNA
tgtcaattttcccccaattaaa

SEQ ID NO: 154162 - RNA, 22 nt, synthetic construct
  source 1..22: mol_type = other RNA
tgtcacaaaatgtggatgcatg

SEQ ID NO: 154163 - RNA, 22 nt, synthetic construct
  source 1..22: mol_type = other RNA
tgtcacaagccagggtctgtct

SEQ ID NO: 154164 - RNA, 22 nt, synthetic construct
  source 1..22: mol_type = other RNA
tgtcacaattcacagaatatac

SEQ ID NO: 154165 - RNA, 22 nt, synthetic construct
  source 1..22: mol_type = other RNA
tgtcacacggaaaacattattt

SEQ ID NO: 154166 - RNA, 22 nt, synthetic construct
  source 1..22: mol_type = other RNA
tgtcacaggctttcctacaata

SEQ ID NO: 154167 - RNA, 22 nt, synthetic construct
  source 1..22: mol_type = other RNA
tgtcacatagaagcgctcttca

SEQ ID NO: 154168 - RNA, 22 nt, synthetic construct
  source 1..22: mol_type = other RNA
tgtcacatagacctgaatgact

SEQ ID NO: 154169 - RNA, 22 nt, synthetic construct
  source 1..22: mol_type = other RNA
tgtcacatttgaaagaaagaag

SEQ ID NO: 154170 - RNA, 22 nt, synthetic construct
  source 1..22: mol_type = other RNA
tgtcacattttcttatctaggc

SEQ ID NO: 154171 - RNA, 22 nt, synthetic construct
  source 1..22: mol_type = other RNA
tgtcaccaggctggaatgcagc

SEQ ID NO: 154172 - RNA, 22 nt, synthetic construct
  source 1..22: mol_type = other RNA
tgtcacccacgtggagtgcaat

SEQ ID NO: 154173 - RNA, 22 nt, synthetic construct
  source 1..22: mol_type = other RNA
tgtcacccttgtaatcaagtat

SEQ ID NO: 154174 - RNA, 22 nt, synthetic construct
  source 1..22: mol_type = other RNA
tgtcacggtgccctacatatgg

SEQ ID NO: 154175 - RNA, 22 nt, synthetic construct
  source 1..22: mol_type = other RNA
tgtcactctctttaggaagctt

SEQ ID NO: 154176 - RNA, 22 nt, synthetic construct
  source 1..22: mol_type = other RNA
tgtcactgacacaggctgaagg

SEQ ID NO: 154177 - RNA, 22 nt, synthetic construct
  source 1..22: mol_type = other RNA
tgtcactggatagaagtgtatc

SEQ ID NO: 154178 - RNA, 22 nt, synthetic construct
  source 1..22: mol_type = other RNA
tgtcactgtaagaataatgtct

SEQ ID NO: 154179 - RNA, 22 nt, synthetic construct
  source 1..22: mol_type = other RNA
tgtcactttcctattcacactg

SEQ ID NO: 154180 - RNA, 22 nt, synthetic construct
  source 1..22: mol_type = other RNA
tgtcagaaaagatcagtaaaat

SEQ ID NO: 154181 - RNA, 22 nt, synthetic construct
  source 1..22: mol_type = other RNA
tgtcagaaacaccaacacaaag

SEQ ID NO: 154182 - RNA, 22 nt, synthetic construct
  source 1..22: mol_type = other RNA
tgtcagaaaccatcgttcacac

SEQ ID NO: 154183 - RNA, 22 nt, synthetic construct
  source 1..22: mol_type = other RNA
tgtcagaattagaaagctggac

SEQ ID NO: 154184 - RNA, 22 nt, synthetic construct
  source 1..22: mol_type = other RNA
tgtcagaattccatcagtggtt

SEQ ID NO: 154185 - RNA, 22 nt, synthetic construct
  source 1..22: mol_type = other RNA
tgtcagactcattgcctataga

SEQ ID NO: 154186 - RNA, 22 nt, synthetic construct
  source 1..22: mol_type = other RNA
tgtcagagacacatactgaaag

SEQ ID NO: 154187 - RNA, 22 nt, synthetic construct
  source 1..22: mol_type = other RNA
tgtcagagatctgaaattgact

SEQ ID NO: 154188 - RNA, 22 nt, synthetic construct
  source 1..22: mol_type = other RNA
tgtcagatggtaaattggtcct

SEQ ID NO: 154189 - RNA, 22 nt, synthetic construct
  source 1..22: mol_type = other RNA
tgtcagattttcttgttataag

SEQ ID NO: 154190 - RNA, 22 nt, synthetic construct
  source 1..22: mol_type = other RNA
tgtcagcagttcagcctgcaga

SEQ ID NO: 154191 - RNA, 22 nt, synthetic construct
  source 1..22: mol_type = other RNA
tgtcagccacaagacataagca

SEQ ID NO: 154192 - RNA, 22 nt, synthetic construct
  source 1..22: mol_type = other RNA
tgtcaggcaagggactgtcgaa

SEQ ID NO: 154193 - RNA, 22 nt, synthetic construct
  source 1..22: mol_type = other RNA
tgtcaggcatgctaactgcaga

SEQ ID NO: 154194 - RNA, 22 nt, synthetic construct
  source 1..22: mol_type = other RNA
tgtcaggtgggcactgggagcc

SEQ ID NO: 154195 - RNA, 22 nt, synthetic construct
  source 1..22: mol_type = other RNA
tgtcagtaattctgcagtgaac

SEQ ID NO: 154196 - RNA, 22 nt, synthetic construct
  source 1..22: mol_type = other RNA
tgtcagtcaacacactagccac

SEQ ID NO: 154197 - RNA, 22 nt, synthetic construct
  source 1..22: mol_type = other RNA
tgtcagtgacagttctgtgaat

SEQ ID NO: 154198 - RNA, 22 nt, synthetic construct
  source 1..22: mol_type = other RNA
tgtcagtgggactggagaacag

SEQ ID NO: 154199 - RNA, 22 nt, synthetic construct
  source 1..22: mol_type = other RNA
tgtcagtgtggttcatatttcc

SEQ ID NO: 154200 - RNA, 22 nt, synthetic construct
  source 1..22: mol_type = other RNA
tgtcagtttctgatttatcttt

SEQ ID NO: 154201 - RNA, 22 nt, synthetic construct
  source 1..22: mol_type = other RNA
tgtcataaacataactttgaag

SEQ ID NO: 154202 - RNA, 22 nt, synthetic construct
  source 1..22: mol_type = other RNA
tgtcataacagtattgtcttct

SEQ ID NO: 154203 - RNA, 22 nt, synthetic construct
  source 1..22: mol_type = other RNA
tgtcatcagcgtcctcactgtg

SEQ ID NO: 154204 - RNA, 22 nt, synthetic construct
  source 1..22: mol_type = other RNA
tgtcatctgaatcaataagaat

SEQ ID NO: 154205 - RNA, 22 nt, synthetic construct
  source 1..22: mol_type = other RNA
tgtcatcttctctctctgcttc

SEQ ID NO: 154206 - RNA, 22 nt, synthetic construct
  source 1..22: mol_type = other RNA
tgtcatgaatgaatgttgagtt

SEQ ID NO: 154207 - RNA, 22 nt, synthetic construct
  source 1..22: mol_type = other RNA
tgtcatgggccgggcgtagtgg

SEQ ID NO: 154208 - RNA, 22 nt, synthetic construct
  source 1..22: mol_type = other RNA
tgtcatggtgtgtctgcgcctt

SEQ ID NO: 154209 - RNA, 22 nt, synthetic construct
  source 1..22: mol_type = other RNA
tgtcatgtatatgctgtttttg

SEQ ID NO: 154210 - RNA, 22 nt, synthetic construct
  source 1..22: mol_type = other RNA
tgtcatgtcaaatttttcacat

SEQ ID NO: 154211 - RNA, 22 nt, synthetic construct
  source 1..22: mol_type = other RNA
tgtcatgttcccggattggaaa

SEQ ID NO: 154212 - RNA, 22 nt, synthetic construct
  source 1..22: mol_type = other RNA
tgtcatgtttgaattttccatt

SEQ ID NO: 154213 - RNA, 22 nt, synthetic construct
  source 1..22: mol_type = other RNA
tgtcattaccttatagatgacg

SEQ ID NO: 154214 - RNA, 22 nt, synthetic construct
  source 1..22: mol_type = other RNA
tgtcattctgcagtttgtgttt

SEQ ID NO: 154215 - RNA, 22 nt, synthetic construct
  source 1..22: mol_type = other RNA
tgtcatttctgcttagtcttct

SEQ ID NO: 154216 - RNA, 22 nt, synthetic construct
  source 1..22: mol_type = other RNA
tgtcatttttaagaaatcgttg

SEQ ID NO: 154217 - RNA, 22 nt, synthetic construct
  source 1..22: mol_type = other RNA
tgtcatttttgtattctgacct

SEQ ID NO: 154218 - RNA, 22 nt, synthetic construct
  source 1..22: mol_type = other RNA
tgtccaaacagtgaccacagtt

SEQ ID NO: 154219 - RNA, 22 nt, synthetic construct
  source 1..22: mol_type = other RNA
tgtccaacaagggttggtgctt

SEQ ID NO: 154220 - RNA, 22 nt, synthetic construct
  source 1..22: mol_type = other RNA
tgtccaacatggcaaaaccccg

SEQ ID NO: 154221 - RNA, 22 nt, synthetic construct
  source 1..22: mol_type = other RNA
tgtccaagtatttctcatctgt

SEQ ID NO: 154222 - RNA, 22 nt, synthetic construct
  source 1..22: mol_type = other RNA
tgtccacacaatggtcagagtt

SEQ ID NO: 154223 - RNA, 22 nt, synthetic construct
  source 1..22: mol_type = other RNA
tgtccaccagacaaaaatagag

SEQ ID NO: 154224 - RNA, 22 nt, synthetic construct
  source 1..22: mol_type = other RNA
tgtccactgtcagtgggactgg

SEQ ID NO: 154225 - RNA, 22 nt, synthetic construct
  source 1..22: mol_type = other RNA
tgtccagaggaggaagagatag

SEQ ID NO: 154226 - RNA, 22 nt, synthetic construct
  source 1..22: mol_type = other RNA
tgtccagcccccagttttgttg

SEQ ID NO: 154227 - RNA, 22 nt, synthetic construct
  source 1..22: mol_type = other RNA
tgtccaggccaacagggccact

SEQ ID NO: 154228 - RNA, 22 nt, synthetic construct
  source 1..22: mol_type = other RNA
tgtccaggcgcctgcattgcat

SEQ ID NO: 154229 - RNA, 22 nt, synthetic construct
  source 1..22: mol_type = other RNA
tgtccatagttaatgtgtgaag

SEQ ID NO: 154230 - RNA, 22 nt, synthetic construct
  source 1..22: mol_type = other RNA
tgtccatcaggaaaaccagttt

SEQ ID NO: 154231 - RNA, 22 nt, synthetic construct
  source 1..22: mol_type = other RNA
tgtccatcgagagatgaatgga

SEQ ID NO: 154232 - RNA, 22 nt, synthetic construct
  source 1..22: mol_type = other RNA
tgtccatctcccatcactagaa

SEQ ID NO: 154233 - RNA, 22 nt, synthetic construct
  source 1..22: mol_type = other RNA
tgtccatctggattatagtggt

SEQ ID NO: 154234 - RNA, 22 nt, synthetic construct
  source 1..22: mol_type = other RNA
tgtccatttccagtactttttc

SEQ ID NO: 154235 - RNA, 22 nt, synthetic construct
  source 1..22: mol_type = other RNA
tgtccatttccttaagcacaga

SEQ ID NO: 154236 - RNA, 22 nt, synthetic construct
  source 1..22: mol_type = other RNA
tgtcccaaatgcaccaacacct

SEQ ID NO: 154237 - RNA, 22 nt, synthetic construct
  source 1..22: mol_type = other RNA
tgtcccatggtcaaatcaatac

SEQ ID NO: 154238 - RNA, 22 nt, synthetic construct
  source 1..22: mol_type = other RNA
tgtccccaccgccttcctaccc

SEQ ID NO: 154239 - RNA, 22 nt, synthetic construct
  source 1..22: mol_type = other RNA
tgtcccctggagttaattccac

SEQ ID NO: 154240 - RNA, 22 nt, synthetic construct
  source 1..22: mol_type = other RNA
tgtcccctggggcctcagcatg

SEQ ID NO: 154241 - RNA, 22 nt, synthetic construct
  source 1..22: mol_type = other RNA
tgtcccctgtccaagtatttct

SEQ ID NO: 154242 - RNA, 22 nt, synthetic construct
  source 1..22: mol_type = other RNA
tgtcccggcatgcctctcccac

SEQ ID NO: 154243 - RNA, 22 nt, synthetic construct
  source 1..22: mol_type = other RNA
tgtccgttgaagtctttggccc

SEQ ID NO: 154244 - RNA, 22 nt, synthetic construct
  source 1..22: mol_type = other RNA
tgtcctaaaattccttcctttg

SEQ ID NO: 154245 - RNA, 22 nt, synthetic construct
  source 1..22: mol_type = other RNA
tgtcctcacctcacattcacag

SEQ ID NO: 154246 - RNA, 22 nt, synthetic construct
  source 1..22: mol_type = other RNA
tgtcctcaggctccaggtagaa

SEQ ID NO: 154247 - RNA, 22 nt, synthetic construct
  source 1..22: mol_type = other RNA
tgtcctcgtaaaagctaatcta

SEQ ID NO: 154248 - RNA, 22 nt, synthetic construct
  source 1..22: mol_type = other RNA
tgtcctctcttgttgaggatga

SEQ ID NO: 154249 - RNA, 22 nt, synthetic construct
  source 1..22: mol_type = other RNA
tgtcctgaatactattcctatt

SEQ ID NO: 154250 - RNA, 22 nt, synthetic construct
  source 1..22: mol_type = other RNA
tgtcctgaatgatttccctgca

SEQ ID NO: 154251 - RNA, 22 nt, synthetic construct
  source 1..22: mol_type = other RNA
tgtcctgaattctaacattatc

SEQ ID NO: 154252 - RNA, 22 nt, synthetic construct
  source 1..22: mol_type = other RNA
tgtcctgaattctaatgaactc

SEQ ID NO: 154253 - RNA, 22 nt, synthetic construct
  source 1..22: mol_type = other RNA
tgtcctggcagatcaattgacc

SEQ ID NO: 154254 - RNA, 22 nt, synthetic construct
  source 1..22: mol_type = other RNA
tgtcctgtcagtgtggttcata

SEQ ID NO: 154255 - RNA, 22 nt, synthetic construct
  source 1..22: mol_type = other RNA
tgtccttaatgccaccgaattg

SEQ ID NO: 154256 - RNA, 22 nt, synthetic construct
  source 1..22: mol_type = other RNA
tgtccttcattctgttaatgtg

SEQ ID NO: 154257 - RNA, 22 nt, synthetic construct
  source 1..22: mol_type = other RNA
tgtccttctcgtgtgagctcta

SEQ ID NO: 154258 - RNA, 22 nt, synthetic construct
  source 1..22: mol_type = other RNA
tgtccttctgagaaggcgaaat

SEQ ID NO: 154259 - RNA, 22 nt, synthetic construct
  source 1..22: mol_type = other RNA
tgtccttggattgctaaactgt

SEQ ID NO: 154260 - RNA, 22 nt, synthetic construct
  source 1..22: mol_type = other RNA
tgtccttgtgttttatttggct

SEQ ID NO: 154261 - RNA, 22 nt, synthetic construct
  source 1..22: mol_type = other RNA
tgtcctttgatgcacaaaagtt

SEQ ID NO: 154262 - RNA, 22 nt, synthetic construct
  source 1..22: mol_type = other RNA
tgtccttttcctgttccgggat

SEQ ID NO: 154263 - RNA, 22 nt, synthetic construct
  source 1..22: mol_type = other RNA
tgtccttttgagtttggtgtat

SEQ ID NO: 154264 - RNA, 22 nt, synthetic construct
  source 1..22: mol_type = other RNA
tgtcgaagcttaatttagatga

SEQ ID NO: 154265 - RNA, 22 nt, synthetic construct
  source 1..22: mol_type = other RNA
tgtcgagaaaaatggggatatc

SEQ ID NO: 154266 - RNA, 22 nt, synthetic construct
  source 1..22: mol_type = other RNA
tgtcgcatgaaaacagctaggt

SEQ ID NO: 154267 - RNA, 22 nt, synthetic construct
  source 1..22: mol_type = other RNA
tgtcgcccaggcggaatgcagt

SEQ ID NO: 154268 - RNA, 22 nt, synthetic construct
  source 1..22: mol_type = other RNA
tgtcgcccaggctggagctcac

SEQ ID NO: 154269 - RNA, 22 nt, synthetic construct
  source 1..22: mol_type = other RNA
tgtcgctctcctgtgccaagtc

SEQ ID NO: 154270 - RNA, 22 nt, synthetic construct
  source 1..22: mol_type = other RNA
tgtcggttttctagttagtttg

SEQ ID NO: 154271 - RNA, 22 nt, synthetic construct
  source 1..22: mol_type = other RNA
tgtcgttgagtacctctgggat

SEQ ID NO: 154272 - RNA, 22 nt, synthetic construct
  source 1..22: mol_type = other RNA
tgtcgtttatgcatttattagt

SEQ ID NO: 154273 - RNA, 22 nt, synthetic construct
  source 1..22: mol_type = other RNA
tgtcgtttatttcttctccctc

SEQ ID NO: 154274 - RNA, 22 nt, synthetic construct
  source 1..22: mol_type = other RNA
tgtctaatgggtacagggtttc

SEQ ID NO: 154275 - RNA, 22 nt, synthetic construct
  source 1..22: mol_type = other RNA
tgtctaattttttagtcttgtc

SEQ ID NO: 154276 - RNA, 22 nt, synthetic construct
  source 1..22: mol_type = other RNA
tgtctacctgtctttcccatta

SEQ ID NO: 154277 - RNA, 22 nt, synthetic construct
  source 1..22: mol_type = other RNA
tgtctagtgaatgagaccaaat

SEQ ID NO: 154278 - RNA, 22 nt, synthetic construct
  source 1..22: mol_type = other RNA
tgtctataggcaatgagtctga

SEQ ID NO: 154279 - RNA, 22 nt, synthetic construct
  source 1..22: mol_type = other RNA
tgtctattccctacattgcctt

SEQ ID NO: 154280 - RNA, 22 nt, synthetic construct
  source 1..22: mol_type = other RNA
tgtctcaacctttgcctcctgg

SEQ ID NO: 154281 - RNA, 22 nt, synthetic construct
  source 1..22: mol_type = other RNA
tgtctcacctcaaggccaactg

SEQ ID NO: 154282 - RNA, 22 nt, synthetic construct
  source 1..22: mol_type = other RNA
tgtctcagagtatatatgctcc

SEQ ID NO: 154283 - RNA, 22 nt, synthetic construct
  source 1..22: mol_type = other RNA
tgtctcagatgtctccattttg

SEQ ID NO: 154284 - RNA, 22 nt, synthetic construct
  source 1..22: mol_type = other RNA
tgtctcagtcccaaatgggagc

SEQ ID NO: 154285 - RNA, 22 nt, synthetic construct
  source 1..22: mol_type = other RNA
tgtctcataaagccggattcct

SEQ ID NO: 154286 - RNA, 22 nt, synthetic construct
  source 1..22: mol_type = other RNA
tgtctcattgtggatgagatta

SEQ ID NO: 154287 - RNA, 22 nt, synthetic construct
  source 1..22: mol_type = other RNA
tgtctccaacgctttttatgga

SEQ ID NO: 154288 - RNA, 22 nt, synthetic construct
  source 1..22: mol_type = other RNA
tgtctccataccccctggaaat

SEQ ID NO: 154289 - RNA, 22 nt, synthetic construct
  source 1..22: mol_type = other RNA
tgtctccatgtcctcacctcac

SEQ ID NO: 154290 - RNA, 22 nt, synthetic construct
  source 1..22: mol_type = other RNA
tgtctccattttgccagctaac

SEQ ID NO: 154291 - RNA, 22 nt, synthetic construct
  source 1..22: mol_type = other RNA
tgtctcctctttcatatctgat

SEQ ID NO: 154292 - RNA, 22 nt, synthetic construct
  source 1..22: mol_type = other RNA
tgtctcggatttaagagaggaa

SEQ ID NO: 154293 - RNA, 22 nt, synthetic construct
  source 1..22: mol_type = other RNA
tgtctctgacatgagagctaag

SEQ ID NO: 154294 - RNA, 22 nt, synthetic construct
  source 1..22: mol_type = other RNA
tgtctctgctctcaagtaattg

SEQ ID NO: 154295 - RNA, 22 nt, synthetic construct
  source 1..22: mol_type = other RNA
tgtctctggaaggctaagcatg

SEQ ID NO: 154296 - RNA, 22 nt, synthetic construct
  source 1..22: mol_type = other RNA
tgtctgactacactgaagggaa

SEQ ID NO: 154297 - RNA, 22 nt, synthetic construct
  source 1..22: mol_type = other RNA
tgtctgatgtgtgtctctgctc

SEQ ID NO: 154298 - RNA, 22 nt, synthetic construct
  source 1..22: mol_type = other RNA
tgtctgcaagcagatctgctgt

SEQ ID NO: 154299 - RNA, 22 nt, synthetic construct
  source 1..22: mol_type = other RNA
tgtctgcaggagccttgctgtt

SEQ ID NO: 154300 - RNA, 22 nt, synthetic construct
  source 1..22: mol_type = other RNA
tgtctgcgccttaaagccacac

SEQ ID NO: 154301 - RNA, 22 nt, synthetic construct
  source 1..22: mol_type = other RNA
tgtctgctacaggggcattccc

SEQ ID NO: 154302 - RNA, 22 nt, synthetic construct
  source 1..22: mol_type = other RNA
tgtctggaacacacattagcct

SEQ ID NO: 154303 - RNA, 22 nt, synthetic construct
  source 1..22: mol_type = other RNA
tgtctggattgattccagtttc

SEQ ID NO: 154304 - RNA, 22 nt, synthetic construct
  source 1..22: mol_type = other RNA
tgtctgggaagttatgtagctg

SEQ ID NO: 154305 - RNA, 22 nt, synthetic construct
  source 1..22: mol_type = other RNA
tgtctgggataatgagtttaat

SEQ ID NO: 154306 - RNA, 22 nt, synthetic construct
  source 1..22: mol_type = other RNA
tgtctggtggacaaaaaacgcg

SEQ ID NO: 154307 - RNA, 22 nt, synthetic construct
  source 1..22: mol_type = other RNA
tgtctggtttgctttggagtca

SEQ ID NO: 154308 - RNA, 22 nt, synthetic construct
  source 1..22: mol_type = other RNA
tgtctgtagttacaactactcg

SEQ ID NO: 154309 - RNA, 22 nt, synthetic construct
  source 1..22: mol_type = other RNA
tgtctgtctgttcacatttcgc

SEQ ID NO: 154310 - RNA, 22 nt, synthetic construct
  source 1..22: mol_type = other RNA
tgtctgtgaaaataatacctaa

SEQ ID NO: 154311 - RNA, 22 nt, synthetic construct
  source 1..22: mol_type = other RNA
tgtctgtgatgtagaggcagtt

SEQ ID NO: 154312 - RNA, 22 nt, synthetic construct
  source 1..22: mol_type = other RNA
tgtctgtgtagttcatcagcat

SEQ ID NO: 154313 - RNA, 22 nt, synthetic construct
  source 1..22: mol_type = other RNA
tgtctgttcacatttcgccttc

SEQ ID NO: 154314 - RNA, 22 nt, synthetic construct
  source 1..22: mol_type = other RNA
tgtcttaagaaggaaaagaaca

SEQ ID NO: 154315 - RNA, 22 nt, synthetic construct
  source 1..22: mol_type = other RNA
tgtcttacataggcttagtaca

SEQ ID NO: 154316 - RNA, 22 nt, synthetic construct
  source 1..22: mol_type = other RNA
tgtcttagtctgacttctctca

SEQ ID NO: 154317 - RNA, 22 nt, synthetic construct
  source 1..22: mol_type = other RNA
tgtcttattgttttgatttgca

SEQ ID NO: 154318 - RNA, 22 nt, synthetic construct
  source 1..22: mol_type = other RNA
tgtcttcagaggccctggtgct

SEQ ID NO: 154319 - RNA, 22 nt, synthetic construct
  source 1..22: mol_type = other RNA
tgtcttctaaccctcaaatgcc

SEQ ID NO: 154320 - RNA, 22 nt, synthetic construct
  source 1..22: mol_type = other RNA
tgtcttctgtttttcttagtct

SEQ ID NO: 154321 - RNA, 22 nt, synthetic construct
  source 1..22: mol_type = other RNA
tgtcttcttggattttcttcat

SEQ ID NO: 154322 - RNA, 22 nt, synthetic construct
  source 1..22: mol_type = other RNA
tgtcttgaatagcatcttagct

SEQ ID NO: 154323 - RNA, 22 nt, synthetic construct
  source 1..22: mol_type = other RNA
tgtcttgatgatagaataccac

SEQ ID NO: 154324 - RNA, 22 nt, synthetic construct
  source 1..22: mol_type = other RNA
tgtcttggacccatgcccatgt

SEQ ID NO: 154325 - RNA, 22 nt, synthetic construct
  source 1..22: mol_type = other RNA
tgtcttggctattgtcagtaat

SEQ ID NO: 154326 - RNA, 22 nt, synthetic construct
  source 1..22: mol_type = other RNA
tgtcttggtgtgctcttttcat

SEQ ID NO: 154327 - RNA, 22 nt, synthetic construct
  source 1..22: mol_type = other RNA
tgtcttgtgcatcctttatacc

SEQ ID NO: 154328 - RNA, 22 nt, synthetic construct
  source 1..22: mol_type = other RNA
tgtcttgtggctgacatgtgta

SEQ ID NO: 154329 - RNA, 22 nt, synthetic construct
  source 1..22: mol_type = other RNA
tgtctttatgccaatatcacac

SEQ ID NO: 154330 - RNA, 22 nt, synthetic construct
  source 1..22: mol_type = other RNA
tgtctttcagtatgtgtctctg

SEQ ID NO: 154331 - RNA, 22 nt, synthetic construct
  source 1..22: mol_type = other RNA
tgtctttcccattaccaaaacc

SEQ ID NO: 154332 - RNA, 22 nt, synthetic construct
  source 1..22: mol_type = other RNA
tgtctttggcccatatcctttt

SEQ ID NO: 154333 - RNA, 22 nt, synthetic construct
  source 1..22: mol_type = other RNA
tgtctttggctcttagaaaata

SEQ ID NO: 154334 - RNA, 22 nt, synthetic construct
  source 1..22: mol_type = other RNA
tgtctttgggaaggccctgatt

SEQ ID NO: 154335 - RNA, 22 nt, synthetic construct
  source 1..22: mol_type = other RNA
tgtctttgtctattccctacat

SEQ ID NO: 154336 - RNA, 22 nt, synthetic construct
  source 1..22: mol_type = other RNA
tgtcttttaacttgctttgaat

SEQ ID NO: 154337 - RNA, 22 nt, synthetic construct
  source 1..22: mol_type = other RNA
tgtcttttctatctgaacattt

SEQ ID NO: 154338 - RNA, 22 nt, synthetic construct
  source 1..22: mol_type = other RNA
tgtcttttgaagaagttcttaa

SEQ ID NO: 154339 - RNA, 22 nt, synthetic construct
  source 1..22: mol_type = other RNA
tgtctttttacacttggagttt

SEQ ID NO: 154340 - RNA, 22 nt, synthetic construct
  source 1..22: mol_type = other RNA
tgtctttttgtgacttgtttat

SEQ ID NO: 154341 - RNA, 22 nt, synthetic construct
  source 1..22: mol_type = other RNA
tgtgaaaaaacaaaacaaaacc

SEQ ID NO: 154342 - RNA, 22 nt, synthetic construct
  source 1..22: mol_type = other RNA
tgtgaaaaatttgacatgacag

SEQ ID NO: 154343 - RNA, 22 nt, synthetic construct
  source 1..22: mol_type = other RNA
tgtgaaaagaaaaaggttaagg

SEQ ID NO: 154344 - RNA, 22 nt, synthetic construct
  source 1..22: mol_type = other RNA
tgtgaaaataatacctaacagc

SEQ ID NO: 154345 - RNA, 22 nt, synthetic construct
  source 1..22: mol_type = other RNA
tgtgaaaatactaacgatcctt

SEQ ID NO: 154346 - RNA, 22 nt, synthetic construct
  source 1..22: mol_type = other RNA
tgtgaaaatcattttggcaaat

SEQ ID NO: 154347 - RNA, 22 nt, synthetic construct
  source 1..22: mol_type = other RNA
tgtgaaaccaagcaagtaaaag

SEQ ID NO: 154348 - RNA, 22 nt, synthetic construct
  source 1..22: mol_type = other RNA
tgtgaaagtagaggactgccta

SEQ ID NO: 154349 - RNA, 22 nt, synthetic construct
  source 1..22: mol_type = other RNA
tgtgaaagtattaaaagcacaa

SEQ ID NO: 154350 - RNA, 22 nt, synthetic construct
  source 1..22: mol_type = other RNA
tgtgaacagacagacatgcatg

SEQ ID NO: 154351 - RNA, 22 nt, synthetic construct
  source 1..22: mol_type = other RNA
tgtgaaccacgcatctggtcta

SEQ ID NO: 154352 - RNA, 22 nt, synthetic construct
  source 1..22: mol_type = other RNA
tgtgaaccttgaagtacttcag

SEQ ID NO: 154353 - RNA, 22 nt, synthetic construct
  source 1..22: mol_type = other RNA
tgtgaacgatggtttctgacac

SEQ ID NO: 154354 - RNA, 22 nt, synthetic construct
  source 1..22: mol_type = other RNA
tgtgaagaaggaatgtgcactc

SEQ ID NO: 154355 - RNA, 22 nt, synthetic construct
  source 1..22: mol_type = other RNA
tgtgaagattaagcacatctgt

SEQ ID NO: 154356 - RNA, 22 nt, synthetic construct
  source 1..22: mol_type = other RNA
tgtgaagggaggtaggcttaga

SEQ ID NO: 154357 - RNA, 22 nt, synthetic construct
  source 1..22: mol_type = other RNA
tgtgaagttgggcttaacattt

SEQ ID NO: 154358 - RNA, 22 nt, synthetic construct
  source 1..22: mol_type = other RNA
tgtgaataggaaagtgacagat

SEQ ID NO: 154359 - RNA, 22 nt, synthetic construct
  source 1..22: mol_type = other RNA
tgtgaatgaggagtgaattttt

SEQ ID NO: 154360 - RNA, 22 nt, synthetic construct
  source 1..22: mol_type = other RNA
tgtgaatggaaaattcaaacat

SEQ ID NO: 154361 - RNA, 22 nt, synthetic construct
  source 1..22: mol_type = other RNA
tgtgaatgtgaggtgaggacat

SEQ ID NO: 154362 - RNA, 22 nt, synthetic construct
  source 1..22: mol_type = other RNA
tgtgaattagatggcttaggat

SEQ ID NO: 154363 - RNA, 22 nt, synthetic construct
  source 1..22: mol_type = other RNA
tgtgaattcactaatgcctcaa

SEQ ID NO: 154364 - RNA, 22 nt, synthetic construct
  source 1..22: mol_type = other RNA
tgtgaattgataaaagtcattg

SEQ ID NO: 154365 - RNA, 22 nt, synthetic construct
  source 1..22: mol_type = other RNA
tgtgaattgtgacagttctatt

SEQ ID NO: 154366 - RNA, 22 nt, synthetic construct
  source 1..22: mol_type = other RNA
tgtgaatttggatttgagtaac

SEQ ID NO: 154367 - RNA, 22 nt, synthetic construct
  source 1..22: mol_type = other RNA
tgtgacaaaaagtaggggtaaa

SEQ ID NO: 154368 - RNA, 22 nt, synthetic construct
  source 1..22: mol_type = other RNA
tgtgacaaacacttttcaaaca

SEQ ID NO: 154369 - RNA, 22 nt, synthetic construct
  source 1..22: mol_type = other RNA
tgtgacaagttcagcatcttca

SEQ ID NO: 154370 - RNA, 22 nt, synthetic construct
  source 1..22: mol_type = other RNA
tgtgacagaacaaactcaagtt

SEQ ID NO: 154371 - RNA, 22 nt, synthetic construct
  source 1..22: mol_type = other RNA
tgtgacagaatgcatcttttaa

SEQ ID NO: 154372 - RNA, 22 nt, synthetic construct
  source 1..22: mol_type = other RNA
tgtgacagtatgtcagactcat

SEQ ID NO: 154373 - RNA, 22 nt, synthetic construct
  source 1..22: mol_type = other RNA
tgtgacagttctatttctttcc

SEQ ID NO: 154374 - RNA, 22 nt, synthetic construct
  source 1..22: mol_type = other RNA
tgtgacatcaagggtggtgctg

SEQ ID NO: 154375 - RNA, 22 nt, synthetic construct
  source 1..22: mol_type = other RNA
tgtgacattagtggtggtagta

SEQ ID NO: 154376 - RNA, 22 nt, synthetic construct
  source 1..22: mol_type = other RNA
tgtgaccacattcccaaatgtc

SEQ ID NO: 154377 - RNA, 22 nt, synthetic construct
  source 1..22: mol_type = other RNA
tgtgaccagatcaaacgtgctt

SEQ ID NO: 154378 - RNA, 22 nt, synthetic construct
  source 1..22: mol_type = other RNA
tgtgacctgtccttgtgtttta

SEQ ID NO: 154379 - RNA, 22 nt, synthetic construct
  source 1..22: mol_type = other RNA
tgtgactagaagaaatgttaac

SEQ ID NO: 154380 - RNA, 22 nt, synthetic construct
  source 1..22: mol_type = other RNA
tgtgactccaaagcaaaccaga

SEQ ID NO: 154381 - RNA, 22 nt, synthetic construct
  source 1..22: mol_type = other RNA
tgtgactgtagtccctgctact

SEQ ID NO: 154382 - RNA, 22 nt, synthetic construct
  source 1..22: mol_type = other RNA
tgtgactgtgagggtaagaaag

SEQ ID NO: 154383 - RNA, 22 nt, synthetic construct
  source 1..22: mol_type = other RNA
tgtgacttcgtcaaggggagag

SEQ ID NO: 154384 - RNA, 22 nt, synthetic construct
  source 1..22: mol_type = other RNA
tgtgagattgatagatcatatg

SEQ ID NO: 154385 - RNA, 22 nt, synthetic construct
  source 1..22: mol_type = other RNA
tgtgagcaaaaatacagctcca

SEQ ID NO: 154386 - RNA, 22 nt, synthetic construct
  source 1..22: mol_type = other RNA
tgtgagcatttagccccctgaa

SEQ ID NO: 154387 - RNA, 22 nt, synthetic construct
  source 1..22: mol_type = other RNA
tgtgagccacagtgcctggcct

SEQ ID NO: 154388 - RNA, 22 nt, synthetic construct
  source 1..22: mol_type = other RNA
tgtgagccacatacatagtatt

SEQ ID NO: 154389 - RNA, 22 nt, synthetic construct
  source 1..22: mol_type = other RNA
tgtgagccaccgtgccgggctt

SEQ ID NO: 154390 - RNA, 22 nt, synthetic construct
  source 1..22: mol_type = other RNA
tgtgagccactaaaacaggaag

SEQ ID NO: 154391 - RNA, 22 nt, synthetic construct
  source 1..22: mol_type = other RNA
tgtgagccactacgcccggccc

SEQ ID NO: 154392 - RNA, 22 nt, synthetic construct
  source 1..22: mol_type = other RNA
tgtgagctctagccttgtactg

SEQ ID NO: 154393 - RNA, 22 nt, synthetic construct
  source 1..22: mol_type = other RNA
tgtgaggatctgttggtgctta

SEQ ID NO: 154394 - RNA, 22 nt, synthetic construct
  source 1..22: mol_type = other RNA
tgtgaggattcgattaaaataa

SEQ ID NO: 154395 - RNA, 22 nt, synthetic construct
  source 1..22: mol_type = other RNA
tgtgagggagatatttcgccta

SEQ ID NO: 154396 - RNA, 22 nt, synthetic construct
  source 1..22: mol_type = other RNA
tgtgagggtaagaaaggagttc

SEQ ID NO: 154397 - RNA, 22 nt, synthetic construct
  source 1..22: mol_type = other RNA
tgtgaggtgaggacatggagac

SEQ ID NO: 154398 - RNA, 22 nt, synthetic construct
  source 1..22: mol_type = other RNA
tgtgagtccttccagtatgatg

SEQ ID NO: 154399 - RNA, 22 nt, synthetic construct
  source 1..22: mol_type = other RNA
tgtgagttttaactcttgcatt

SEQ ID NO: 154400 - RNA, 22 nt, synthetic construct
  source 1..22: mol_type = other RNA
tgtgataactgatatgagggat

SEQ ID NO: 154401 - RNA, 22 nt, synthetic construct
  source 1..22: mol_type = other RNA
tgtgatacctagtacgtaacct

SEQ ID NO: 154402 - RNA, 22 nt, synthetic construct
  source 1..22: mol_type = other RNA
tgtgatatattatgaaccattg

SEQ ID NO: 154403 - RNA, 22 nt, synthetic construct
  source 1..22: mol_type = other RNA
tgtgatatgccacattttttgg

SEQ ID NO: 154404 - RNA, 22 nt, synthetic construct
  source 1..22: mol_type = other RNA
tgtgatattggcataaagacag

SEQ ID NO: 154405 - RNA, 22 nt, synthetic construct
  source 1..22: mol_type = other RNA
tgtgatcagaagagcactatgt

SEQ ID NO: 154406 - RNA, 22 nt, synthetic construct
  source 1..22: mol_type = other RNA
tgtgatcaggaaagatgaagta

SEQ ID NO: 154407 - RNA, 22 nt, synthetic construct
  source 1..22: mol_type = other RNA
tgtgatccctgatatgtcgcat

SEQ ID NO: 154408 - RNA, 22 nt, synthetic construct
  source 1..22: mol_type = other RNA
tgtgatctatgcatactgcagc

SEQ ID NO: 154409 - RNA, 22 nt, synthetic construct
  source 1..22: mol_type = other RNA
tgtgatctctgctcaccgcaac

SEQ ID NO: 154410 - RNA, 22 nt, synthetic construct
  source 1..22: mol_type = other RNA
tgtgatgactgtaagctgaact

SEQ ID NO: 154411 - RNA, 22 nt, synthetic construct
  source 1..22: mol_type = other RNA
tgtgatgattttagaaggtaag

SEQ ID NO: 154412 - RNA, 22 nt, synthetic construct
  source 1..22: mol_type = other RNA
tgtgatggcatcattcataaac

SEQ ID NO: 154413 - RNA, 22 nt, synthetic construct
  source 1..22: mol_type = other RNA
tgtgatggcgcatgcctgtggt

SEQ ID NO: 154414 - RNA, 22 nt, synthetic construct
  source 1..22: mol_type = other RNA
tgtgatgggggtaagattgtgg

SEQ ID NO: 154415 - RNA, 22 nt, synthetic construct
  source 1..22: mol_type = other RNA
tgtgatgtagaggcagttgagt

SEQ ID NO: 154416 - RNA, 22 nt, synthetic construct
  source 1..22: mol_type = other RNA
tgtgatgtctcagatgtctcca

SEQ ID NO: 154417 - RNA, 22 nt, synthetic construct
  source 1..22: mol_type = other RNA
tgtgattacaattcctttctag

SEQ ID NO: 154418 - RNA, 22 nt, synthetic construct
  source 1..22: mol_type = other RNA
tgtgattaccggcatccgccac

SEQ ID NO: 154419 - RNA, 22 nt, synthetic construct
  source 1..22: mol_type = other RNA
tgtgattatcagggatattggc

SEQ ID NO: 154420 - RNA, 22 nt, synthetic construct
  source 1..22: mol_type = other RNA
tgtgattgcaggtgtgggccac

SEQ ID NO: 154421 - RNA, 22 nt, synthetic construct
  source 1..22: mol_type = other RNA
tgtgatttatgtggcatttaaa

SEQ ID NO: 154422 - RNA, 22 nt, synthetic construct
  source 1..22: mol_type = other RNA
tgtgatttccagtgtttggttt

SEQ ID NO: 154423 - RNA, 22 nt, synthetic construct
  source 1..22: mol_type = other RNA
tgtgatttgtagatattttctg

SEQ ID NO: 154424 - RNA, 22 nt, synthetic construct
  source 1..22: mol_type = other RNA
tgtgcaaaggattagaaagtag

SEQ ID NO: 154425 - RNA, 22 nt, synthetic construct
  source 1..22: mol_type = other RNA
tgtgcaacataaatagggtgct

SEQ ID NO: 154426 - RNA, 22 nt, synthetic construct
  source 1..22: mol_type = other RNA
tgtgcaaccatccccgctgtcc

SEQ ID NO: 154427 - RNA, 22 nt, synthetic construct
  source 1..22: mol_type = other RNA
tgtgcaaggagagaaaaacaaa

SEQ ID NO: 154428 - RNA, 22 nt, synthetic construct
  source 1..22: mol_type = other RNA
tgtgcacaacacatgcacacta

SEQ ID NO: 154429 - RNA, 22 nt, synthetic construct
  source 1..22: mol_type = other RNA
tgtgcacacatccacgcgtaag

SEQ ID NO: 154430 - RNA, 22 nt, synthetic construct
  source 1..22: mol_type = other RNA
tgtgcacatgttccctagaact

SEQ ID NO: 154431 - RNA, 22 nt, synthetic construct
  source 1..22: mol_type = other RNA
tgtgcacctaataaaatgttta

SEQ ID NO: 154432 - RNA, 22 nt, synthetic construct
  source 1..22: mol_type = other RNA
tgtgcacctccagtgtcctgaa

SEQ ID NO: 154433 - RNA, 22 nt, synthetic construct
  source 1..22: mol_type = other RNA
tgtgcacctcgggttcaagccc

SEQ ID NO: 154434 - RNA, 22 nt, synthetic construct
  source 1..22: mol_type = other RNA
tgtgcacgtttgctttggagtg

SEQ ID NO: 154435 - RNA, 22 nt, synthetic construct
  source 1..22: mol_type = other RNA
tgtgcactcttttaaacccatt

SEQ ID NO: 154436 - RNA, 22 nt, synthetic construct
  source 1..22: mol_type = other RNA
tgtgcacttaaaatttagatct

SEQ ID NO: 154437 - RNA, 22 nt, synthetic construct
  source 1..22: mol_type = other RNA
tgtgcaggaaacttccagaaac

SEQ ID NO: 154438 - RNA, 22 nt, synthetic construct
  source 1..22: mol_type = other RNA
tgtgcagtctaaccattaacag

SEQ ID NO: 154439 - RNA, 22 nt, synthetic construct
  source 1..22: mol_type = other RNA
tgtgcagtggatgactaggctc

SEQ ID NO: 154440 - RNA, 22 nt, synthetic construct
  source 1..22: mol_type = other RNA
tgtgcatactgtgatgatttta

SEQ ID NO: 154441 - RNA, 22 nt, synthetic construct
  source 1..22: mol_type = other RNA
tgtgcatatataccacattttg

SEQ ID NO: 154442 - RNA, 22 nt, synthetic construct
  source 1..22: mol_type = other RNA
tgtgcatcaaaggacactattg

SEQ ID NO: 154443 - RNA, 22 nt, synthetic construct
  source 1..22: mol_type = other RNA
tgtgcatcagaattccattcct

SEQ ID NO: 154444 - RNA, 22 nt, synthetic construct
  source 1..22: mol_type = other RNA
tgtgcatcctttatacctttta

SEQ ID NO: 154445 - RNA, 22 nt, synthetic construct
  source 1..22: mol_type = other RNA
tgtgcatgaccctgctatgcat

SEQ ID NO: 154446 - RNA, 22 nt, synthetic construct
  source 1..22: mol_type = other RNA
tgtgcatgcatgtctgtctgtt

SEQ ID NO: 154447 - RNA, 22 nt, synthetic construct
  source 1..22: mol_type = other RNA
tgtgcatgctcccatttgggac

SEQ ID NO: 154448 - RNA, 22 nt, synthetic construct
  source 1..22: mol_type = other RNA
tgtgcatgtgcaggaaacttcc

SEQ ID NO: 154449 - RNA, 22 nt, synthetic construct
  source 1..22: mol_type = other RNA
tgtgcatgtgttgtgcacacat

SEQ ID NO: 154450 - RNA, 22 nt, synthetic construct
  source 1..22: mol_type = other RNA
tgtgccaactctggcaggtcac

SEQ ID NO: 154451 - RNA, 22 nt, synthetic construct
  source 1..22: mol_type = other RNA
tgtgccaagcaacttgatcagg

SEQ ID NO: 154452 - RNA, 22 nt, synthetic construct
  source 1..22: mol_type = other RNA
tgtgccaagtccgtgcatgcct

SEQ ID NO: 154453 - RNA, 22 nt, synthetic construct
  source 1..22: mol_type = other RNA
tgtgccagtgaactccagtctg

SEQ ID NO: 154454 - RNA, 22 nt, synthetic construct
  source 1..22: mol_type = other RNA
tgtgccagtgcaaacctcctgg

SEQ ID NO: 154455 - RNA, 22 nt, synthetic construct
  source 1..22: mol_type = other RNA
tgtgccatctccttaatccagt

SEQ ID NO: 154456 - RNA, 22 nt, synthetic construct
  source 1..22: mol_type = other RNA
tgtgcccaaggaaggcagggta

SEQ ID NO: 154457 - RNA, 22 nt, synthetic construct
  source 1..22: mol_type = other RNA
tgtgcccaggctgacttagagg

SEQ ID NO: 154458 - RNA, 22 nt, synthetic construct
  source 1..22: mol_type = other RNA
tgtgccgaggcagagagagtaa

SEQ ID NO: 154459 - RNA, 22 nt, synthetic construct
  source 1..22: mol_type = other RNA
tgtgcctacatagtccactttc

SEQ ID NO: 154460 - RNA, 22 nt, synthetic construct
  source 1..22: mol_type = other RNA
tgtgccttgatccattacatca

SEQ ID NO: 154461 - RNA, 22 nt, synthetic construct
  source 1..22: mol_type = other RNA
tgtgcgtgaatctgttcctggg

SEQ ID NO: 154462 - RNA, 22 nt, synthetic construct
  source 1..22: mol_type = other RNA
tgtgctacctcaaattgtgtgt

SEQ ID NO: 154463 - RNA, 22 nt, synthetic construct
  source 1..22: mol_type = other RNA
tgtgctagatgctaaacagtac

SEQ ID NO: 154464 - RNA, 22 nt, synthetic construct
  source 1..22: mol_type = other RNA
tgtgctagccttcttggagtaa

SEQ ID NO: 154465 - RNA, 22 nt, synthetic construct
  source 1..22: mol_type = other RNA
tgtgctcagtggttctgcgtgt

SEQ ID NO: 154466 - RNA, 22 nt, synthetic construct
  source 1..22: mol_type = other RNA
tgtgctctgtatttaatctttt

SEQ ID NO: 154467 - RNA, 22 nt, synthetic construct
  source 1..22: mol_type = other RNA
tgtgctcttttcatcactcact

SEQ ID NO: 154468 - RNA, 22 nt, synthetic construct
  source 1..22: mol_type = other RNA
tgtgctgaaaccccgcatactg

SEQ ID NO: 154469 - RNA, 22 nt, synthetic construct
  source 1..22: mol_type = other RNA
tgtgctgactagtacgtgcaga

SEQ ID NO: 154470 - RNA, 22 nt, synthetic construct
  source 1..22: mol_type = other RNA
tgtgctgagatggtcagtacta

SEQ ID NO: 154471 - RNA, 22 nt, synthetic construct
  source 1..22: mol_type = other RNA
tgtgctgtccatttccttaagc

SEQ ID NO: 154472 - RNA, 22 nt, synthetic construct
  source 1..22: mol_type = other RNA
tgtgcttaaggaaatggacagc

SEQ ID NO: 154473 - RNA, 22 nt, synthetic construct
  source 1..22: mol_type = other RNA
tgtgcttaatcttcacacttag

SEQ ID NO: 154474 - RNA, 22 nt, synthetic construct
  source 1..22: mol_type = other RNA
tgtgcttacacacacgtttata

SEQ ID NO: 154475 - RNA, 22 nt, synthetic construct
  source 1..22: mol_type = other RNA
tgtgcttccacagctatcaggc

SEQ ID NO: 154476 - RNA, 22 nt, synthetic construct
  source 1..22: mol_type = other RNA
tgtgcttcctaaacctgctacg

SEQ ID NO: 154477 - RNA, 22 nt, synthetic construct
  source 1..22: mol_type = other RNA
tgtgcttcgaggtcgcaccctg

SEQ ID NO: 154478 - RNA, 22 nt, synthetic construct
  source 1..22: mol_type = other RNA
tgtgcttctgataggaatatcg

SEQ ID NO: 154479 - RNA, 22 nt, synthetic construct
  source 1..22: mol_type = other RNA
tgtgcttggagtcacttgacaa

SEQ ID NO: 154480 - RNA, 22 nt, synthetic construct
  source 1..22: mol_type = other RNA
tgtgcttggatattctacagaa

SEQ ID NO: 154481 - RNA, 22 nt, synthetic construct
  source 1..22: mol_type = other RNA
tgtgcttgggctcccttccagc

SEQ ID NO: 154482 - RNA, 22 nt, synthetic construct
  source 1..22: mol_type = other RNA
tgtgcttgtctctctctttctc

SEQ ID NO: 154483 - RNA, 22 nt, synthetic construct
  source 1..22: mol_type = other RNA
tgtgcttgtgcttttaatactt

SEQ ID NO: 154484 - RNA, 22 nt, synthetic construct
  source 1..22: mol_type = other RNA
tgtgctttctcaacactgtgtt

SEQ ID NO: 154485 - RNA, 22 nt, synthetic construct
  source 1..22: mol_type = other RNA
tgtgcttttaatactttcacac

SEQ ID NO: 154486 - RNA, 22 nt, synthetic construct
  source 1..22: mol_type = other RNA
tgtgcttttctcgtgcatgtct

SEQ ID NO: 154487 - RNA, 22 nt, synthetic construct
  source 1..22: mol_type = other RNA
tgtggaaaaatataggaacata

SEQ ID NO: 154488 - RNA, 22 nt, synthetic construct
  source 1..22: mol_type = other RNA
tgtggaaaatgtatgattttct

SEQ ID NO: 154489 - RNA, 22 nt, synthetic construct
  source 1..22: mol_type = other RNA
tgtggaacataatctttggtgc

SEQ ID NO: 154490 - RNA, 22 nt, synthetic construct
  source 1..22: mol_type = other RNA
tgtggaagcacagtctctgcag

SEQ ID NO: 154491 - RNA, 22 nt, synthetic construct
  source 1..22: mol_type = other RNA
tgtggaagcagaactaagaccc

SEQ ID NO: 154492 - RNA, 22 nt, synthetic construct
  source 1..22: mol_type = other RNA
tgtggaattaactccaggggac

SEQ ID NO: 154493 - RNA, 22 nt, synthetic construct
  source 1..22: mol_type = other RNA
tgtggacacactgaaacaatcg

SEQ ID NO: 154494 - RNA, 22 nt, synthetic construct
  source 1..22: mol_type = other RNA
tgtggaccatgttttaggagtc

SEQ ID NO: 154495 - RNA, 22 nt, synthetic construct
  source 1..22: mol_type = other RNA
tgtggactttaggctgttcaat

SEQ ID NO: 154496 - RNA, 22 nt, synthetic construct
  source 1..22: mol_type = other RNA
tgtggagataaagagcaggtgg

SEQ ID NO: 154497 - RNA, 22 nt, synthetic construct
  source 1..22: mol_type = other RNA
tgtggagatggggacttgctct

SEQ ID NO: 154498 - RNA, 22 nt, synthetic construct
  source 1..22: mol_type = other RNA
tgtggaggcagtaccattcccc

SEQ ID NO: 154499 - RNA, 22 nt, synthetic construct
  source 1..22: mol_type = other RNA
tgtggagtcctgtcagtttctg

SEQ ID NO: 154500 - RNA, 22 nt, synthetic construct
  source 1..22: mol_type = other RNA
tgtggagtggaggggcaggaaa

SEQ ID NO: 154501 - RNA, 22 nt, synthetic construct
  source 1..22: mol_type = other RNA
tgtggagtggggcacctaaaag

SEQ ID NO: 154502 - RNA, 22 nt, synthetic construct
  source 1..22: mol_type = other RNA
tgtggagttggtgcaaggataa

SEQ ID NO: 154503 - RNA, 22 nt, synthetic construct
  source 1..22: mol_type = other RNA
tgtggatagtgctttttacttt

SEQ ID NO: 154504 - RNA, 22 nt, synthetic construct
  source 1..22: mol_type = other RNA
tgtggatgagattaatgtaggt

SEQ ID NO: 154505 - RNA, 22 nt, synthetic construct
  source 1..22: mol_type = other RNA
tgtggatgcatgaggcatatta

SEQ ID NO: 154506 - RNA, 22 nt, synthetic construct
  source 1..22: mol_type = other RNA
tgtggatgtccttaatgccacc

SEQ ID NO: 154507 - RNA, 22 nt, synthetic construct
  source 1..22: mol_type = other RNA
tgtggatgttggtgagaaccca

SEQ ID NO: 154508 - RNA, 22 nt, synthetic construct
  source 1..22: mol_type = other RNA
tgtggcaaatttatgtgaaaag

SEQ ID NO: 154509 - RNA, 22 nt, synthetic construct
  source 1..22: mol_type = other RNA
tgtggcagaatttacatttttt

SEQ ID NO: 154510 - RNA, 22 nt, synthetic construct
  source 1..22: mol_type = other RNA
tgtggcaggggctgcatcatgg

SEQ ID NO: 154511 - RNA, 22 nt, synthetic construct
  source 1..22: mol_type = other RNA
tgtggcatctttgttacagcag

SEQ ID NO: 154512 - RNA, 22 nt, synthetic construct
  source 1..22: mol_type = other RNA
tgtggcatgtctgtagttacaa

SEQ ID NO: 154513 - RNA, 22 nt, synthetic construct
  source 1..22: mol_type = other RNA
tgtggcatttcttacacattag

SEQ ID NO: 154514 - RNA, 22 nt, synthetic construct
  source 1..22: mol_type = other RNA
tgtggccaggaggaggagggtg

SEQ ID NO: 154515 - RNA, 22 nt, synthetic construct
  source 1..22: mol_type = other RNA
tgtggccgagggagacggcgag

SEQ ID NO: 154516 - RNA, 22 nt, synthetic construct
  source 1..22: mol_type = other RNA
tgtggcctcttcccttgtgcac

SEQ ID NO: 154517 - RNA, 22 nt, synthetic construct
  source 1..22: mol_type = other RNA
tgtggctaacaatcaaatttaa

SEQ ID NO: 154518 - RNA, 22 nt, synthetic construct
  source 1..22: mol_type = other RNA
tgtggctacaccctgggaaagc

SEQ ID NO: 154519 - RNA, 22 nt, synthetic construct
  source 1..22: mol_type = other RNA
tgtggctcacattgtatttctg

SEQ ID NO: 154520 - RNA, 22 nt, synthetic construct
  source 1..22: mol_type = other RNA
tgtggctcactcatttccgttg

SEQ ID NO: 154521 - RNA, 22 nt, synthetic construct
  source 1..22: mol_type = other RNA
tgtggctgacatgtgtaaaaca

SEQ ID NO: 154522 - RNA, 22 nt, synthetic construct
  source 1..22: mol_type = other RNA
tgtggcttctcaaactgtgtgc

SEQ ID NO: 154523 - RNA, 22 nt, synthetic construct
  source 1..22: mol_type = other RNA
tgtggcttgcaaggcccaccat

SEQ ID NO: 154524 - RNA, 22 nt, synthetic construct
  source 1..22: mol_type = other RNA
tgtggcttgggtgacctcatgt

SEQ ID NO: 154525 - RNA, 22 nt, synthetic construct
  source 1..22: mol_type = other RNA
tgtggcttgtggctacaccctg

SEQ ID NO: 154526 - RNA, 22 nt, synthetic construct
  source 1..22: mol_type = other RNA
tgtggctttaaggcgcagacac

SEQ ID NO: 154527 - RNA, 22 nt, synthetic construct
  source 1..22: mol_type = other RNA
tgtgggaattcagtcaccaaac

SEQ ID NO: 154528 - RNA, 22 nt, synthetic construct
  source 1..22: mol_type = other RNA
tgtgggccaccaagccctgcct

SEQ ID NO: 154529 - RNA, 22 nt, synthetic construct
  source 1..22: mol_type = other RNA
tgtggggaatgctcataattaa

SEQ ID NO: 154530 - RNA, 22 nt, synthetic construct
  source 1..22: mol_type = other RNA
tgtggggactttgtggcctctt

SEQ ID NO: 154531 - RNA, 22 nt, synthetic construct
  source 1..22: mol_type = other RNA
tgtgggtattttgttgttgttg

SEQ ID NO: 154532 - RNA, 22 nt, synthetic construct
  source 1..22: mol_type = other RNA
tgtgggttaaaagttagctggc

SEQ ID NO: 154533 - RNA, 22 nt, synthetic construct
  source 1..22: mol_type = other RNA
tgtggtcacactttttgtgagt

SEQ ID NO: 154534 - RNA, 22 nt, synthetic construct
  source 1..22: mol_type = other RNA
tgtggtcactgtttggacagta

SEQ ID NO: 154535 - RNA, 22 nt, synthetic construct
  source 1..22: mol_type = other RNA
tgtggtccctgctactcaggag

SEQ ID NO: 154536 - RNA, 22 nt, synthetic construct
  source 1..22: mol_type = other RNA
tgtggtctcagctcctcagaag

SEQ ID NO: 154537 - RNA, 22 nt, synthetic construct
  source 1..22: mol_type = other RNA
tgtggtctcttcgagggggctg

SEQ ID NO: 154538 - RNA, 22 nt, synthetic construct
  source 1..22: mol_type = other RNA
tgtggtcttaagagactctcaa

SEQ ID NO: 154539 - RNA, 22 nt, synthetic construct
  source 1..22: mol_type = other RNA
tgtggtcttgtctcaacctttg

SEQ ID NO: 154540 - RNA, 22 nt, synthetic construct
  source 1..22: mol_type = other RNA
tgtggtgctgcacgtctgtggt

SEQ ID NO: 154541 - RNA, 22 nt, synthetic construct
  source 1..22: mol_type = other RNA
tgtggtggtatgcactgtactc

SEQ ID NO: 154542 - RNA, 22 nt, synthetic construct
  source 1..22: mol_type = other RNA
tgtggtggtctcaccctcagga

SEQ ID NO: 154543 - RNA, 22 nt, synthetic construct
  source 1..22: mol_type = other RNA
tgtggtgtggcatgtctgtagt

SEQ ID NO: 154544 - RNA, 22 nt, synthetic construct
  source 1..22: mol_type = other RNA
tgtggttattgagtctgtaggg

SEQ ID NO: 154545 - RNA, 22 nt, synthetic construct
  source 1..22: mol_type = other RNA
tgtggttcatatttcccttttg

SEQ ID NO: 154546 - RNA, 22 nt, synthetic construct
  source 1..22: mol_type = other RNA
tgtggtttcttgaatctctcta

SEQ ID NO: 154547 - RNA, 22 nt, synthetic construct
  source 1..22: mol_type = other RNA
tgtggtttgccttttcactctt

SEQ ID NO: 154548 - RNA, 22 nt, synthetic construct
  source 1..22: mol_type = other RNA
tgtggttttaacctcttgaagt

SEQ ID NO: 154549 - RNA, 22 nt, synthetic construct
  source 1..22: mol_type = other RNA
tgtggtttttggttcacttgaa

SEQ ID NO: 154550 - RNA, 22 nt, synthetic construct
  source 1..22: mol_type = other RNA
tgtgtaaaacatctggaaggaa

SEQ ID NO: 154551 - RNA, 22 nt, synthetic construct
  source 1..22: mol_type = other RNA
tgtgtaaacactgttctgcgtg

SEQ ID NO: 154552 - RNA, 22 nt, synthetic construct
  source 1..22: mol_type = other RNA
tgtgtaactaccactgaggtca

SEQ ID NO: 154553 - RNA, 22 nt, synthetic construct
  source 1..22: mol_type = other RNA
tgtgtaagaaatgccacatttt

SEQ ID NO: 154554 - RNA, 22 nt, synthetic construct
  source 1..22: mol_type = other RNA
tgtgtaagcacacatgaacctg

SEQ ID NO: 154555 - RNA, 22 nt, synthetic construct
  source 1..22: mol_type = other RNA
tgtgtaatactgtagaatgttt

SEQ ID NO: 154556 - RNA, 22 nt, synthetic construct
  source 1..22: mol_type = other RNA
tgtgtaattgtaccttggagag

SEQ ID NO: 154557 - RNA, 22 nt, synthetic construct
  source 1..22: mol_type = other RNA
tgtgtacaatggggctttactg

SEQ ID NO: 154558 - RNA, 22 nt, synthetic construct
  source 1..22: mol_type = other RNA
tgtgtaccaaaagtcctgttct

SEQ ID NO: 154559 - RNA, 22 nt, synthetic construct
  source 1..22: mol_type = other RNA
tgtgtacccgtgtgttttgttg

SEQ ID NO: 154560 - RNA, 22 nt, synthetic construct
  source 1..22: mol_type = other RNA
tgtgtagaaatgtggagataaa

SEQ ID NO: 154561 - RNA, 22 nt, synthetic construct
  source 1..22: mol_type = other RNA
tgtgtagaggtgaagttaaggg

SEQ ID NO: 154562 - RNA, 22 nt, synthetic construct
  source 1..22: mol_type = other RNA
tgtgtagcgggaaaaaataata

SEQ ID NO: 154563 - RNA, 22 nt, synthetic construct
  source 1..22: mol_type = other RNA
tgtgtaggaaggaacacacacc

SEQ ID NO: 154564 - RNA, 22 nt, synthetic construct
  source 1..22: mol_type = other RNA
tgtgtagtcagtgaagatgctg

SEQ ID NO: 154565 - RNA, 22 nt, synthetic construct
  source 1..22: mol_type = other RNA
tgtgtagttcatcagcataaat

SEQ ID NO: 154566 - RNA, 22 nt, synthetic construct
  source 1..22: mol_type = other RNA
tgtgtagttctggtgtcgttta

SEQ ID NO: 154567 - RNA, 22 nt, synthetic construct
  source 1..22: mol_type = other RNA
tgtgtataacccgttttttcct

SEQ ID NO: 154568 - RNA, 22 nt, synthetic construct
  source 1..22: mol_type = other RNA
tgtgtatatggtaaaatgtaca

SEQ ID NO: 154569 - RNA, 22 nt, synthetic construct
  source 1..22: mol_type = other RNA
tgtgtatgatcaaagtgaaagg

SEQ ID NO: 154570 - RNA, 22 nt, synthetic construct
  source 1..22: mol_type = other RNA
tgtgtatgtgtagtcagtgaag

SEQ ID NO: 154571 - RNA, 22 nt, synthetic construct
  source 1..22: mol_type = other RNA
tgtgtatgttacacttccagta

SEQ ID NO: 154572 - RNA, 22 nt, synthetic construct
  source 1..22: mol_type = other RNA
tgtgtatttagggagcatatat

SEQ ID NO: 154573 - RNA, 22 nt, synthetic construct
  source 1..22: mol_type = other RNA
tgtgtatttttagtagggacgg

SEQ ID NO: 154574 - RNA, 22 nt, synthetic construct
  source 1..22: mol_type = other RNA
tgtgtcaagtacaactaataat

SEQ ID NO: 154575 - RNA, 22 nt, synthetic construct
  source 1..22: mol_type = other RNA
tgtgtcagtgacagttctgtga

SEQ ID NO: 154576 - RNA, 22 nt, synthetic construct
  source 1..22: mol_type = other RNA
tgtgtcatttttgtattctgac

SEQ ID NO: 154577 - RNA, 22 nt, synthetic construct
  source 1..22: mol_type = other RNA
tgtgtccacacaatggtcagag

SEQ ID NO: 154578 - RNA, 22 nt, synthetic construct
  source 1..22: mol_type = other RNA
tgtgtccaggccaacagggcca

SEQ ID NO: 154579 - RNA, 22 nt, synthetic construct
  source 1..22: mol_type = other RNA
tgtgtcgagaaaaatggggata

SEQ ID NO: 154580 - RNA, 22 nt, synthetic construct
  source 1..22: mol_type = other RNA
tgtgtctagtgaatgagaccaa

SEQ ID NO: 154581 - RNA, 22 nt, synthetic construct
  source 1..22: mol_type = other RNA
tgtgtctcataaagccggattc

SEQ ID NO: 154582 - RNA, 22 nt, synthetic construct
  source 1..22: mol_type = other RNA
tgtgtctctgacatgagagcta

SEQ ID NO: 154583 - RNA, 22 nt, synthetic construct
  source 1..22: mol_type = other RNA
tgtgtctctgctctcaagtaat

SEQ ID NO: 154584 - RNA, 22 nt, synthetic construct
  source 1..22: mol_type = other RNA
tgtgtctgactacactgaaggg

SEQ ID NO: 154585 - RNA, 22 nt, synthetic construct
  source 1..22: mol_type = other RNA
tgtgtctgcgccttaaagccac

SEQ ID NO: 154586 - RNA, 22 nt, synthetic construct
  source 1..22: mol_type = other RNA
tgtgtcttctgtttttcttagt

SEQ ID NO: 154587 - RNA, 22 nt, synthetic construct
  source 1..22: mol_type = other RNA
tgtgtctttttatattatgtgc

SEQ ID NO: 154588 - RNA, 22 nt, synthetic construct
  source 1..22: mol_type = other RNA
tgtgtgaagaaggaatgtgcac

SEQ ID NO: 154589 - RNA, 22 nt, synthetic construct
  source 1..22: mol_type = other RNA
tgtgtgaatggaaaattcaaac

SEQ ID NO: 154590 - RNA, 22 nt, synthetic construct
  source 1..22: mol_type = other RNA
tgtgtgactgtagtccctgcta

SEQ ID NO: 154591 - RNA, 22 nt, synthetic construct
  source 1..22: mol_type = other RNA
tgtgtgcaaaggattagaaagt

SEQ ID NO: 154592 - RNA, 22 nt, synthetic construct
  source 1..22: mol_type = other RNA
tgtgtgcacaacacatgcacac

SEQ ID NO: 154593 - RNA, 22 nt, synthetic construct
  source 1..22: mol_type = other RNA
tgtgtgcacctaataaaatgtt

SEQ ID NO: 154594 - RNA, 22 nt, synthetic construct
  source 1..22: mol_type = other RNA
tgtgtgcatgcatgtctgtctg

SEQ ID NO: 154595 - RNA, 22 nt, synthetic construct
  source 1..22: mol_type = other RNA
tgtgtgcatgctcccatttggg

SEQ ID NO: 154596 - RNA, 22 nt, synthetic construct
  source 1..22: mol_type = other RNA
tgtgtgcttacacacacgttta

SEQ ID NO: 154597 - RNA, 22 nt, synthetic construct
  source 1..22: mol_type = other RNA
tgtgtgcttggagtcacttgac

SEQ ID NO: 154598 - RNA, 22 nt, synthetic construct
  source 1..22: mol_type = other RNA
tgtgtggacacactgaaacaat

SEQ ID NO: 154599 - RNA, 22 nt, synthetic construct
  source 1..22: mol_type = other RNA
tgtgtggagtggggcacctaaa

SEQ ID NO: 154600 - RNA, 22 nt, synthetic construct
  source 1..22: mol_type = other RNA
tgtgtggcttctcaaactgtgt

SEQ ID NO: 154601 - RNA, 22 nt, synthetic construct
  source 1..22: mol_type = other RNA
tgtgtggtttgccttttcactc

SEQ ID NO: 154602 - RNA, 22 nt, synthetic construct
  source 1..22: mol_type = other RNA
tgtgtgtaagcacacatgaacc

SEQ ID NO: 154603 - RNA, 22 nt, synthetic construct
  source 1..22: mol_type = other RNA
tgtgtgtataacccgttttttc

SEQ ID NO: 154604 - RNA, 22 nt, synthetic construct
  source 1..22: mol_type = other RNA
tgtgtgtccaggccaacagggc

SEQ ID NO: 154605 - RNA, 22 nt, synthetic construct
  source 1..22: mol_type = other RNA
tgtgtgtcgagaaaaatgggga

SEQ ID NO: 154606 - RNA, 22 nt, synthetic construct
  source 1..22: mol_type = other RNA
tgtgtgtctctgctctcaagta

SEQ ID NO: 154607 - RNA, 22 nt, synthetic construct
  source 1..22: mol_type = other RNA
tgtgtgtgtccaggccaacagg

SEQ ID NO: 154608 - RNA, 22 nt, synthetic construct
  source 1..22: mol_type = other RNA
tgtgtgttccagacaaaaattt

SEQ ID NO: 154609 - RNA, 22 nt, synthetic construct
  source 1..22: mol_type = other RNA
tgtgtgttccttcctacacata

SEQ ID NO: 154610 - RNA, 22 nt, synthetic construct
  source 1..22: mol_type = other RNA
tgtgtgttctctttttgacaga

SEQ ID NO: 154611 - RNA, 22 nt, synthetic construct
  source 1..22: mol_type = other RNA
tgtgtgtttgtgaaaaatacaa

SEQ ID NO: 154612 - RNA, 22 nt, synthetic construct
  source 1..22: mol_type = other RNA
tgtgttaaaccattcttgcatc

SEQ ID NO: 154613 - RNA, 22 nt, synthetic construct
  source 1..22: mol_type = other RNA
tgtgttaaatttgattgttagc

SEQ ID NO: 154614 - RNA, 22 nt, synthetic construct
  source 1..22: mol_type = other RNA
tgtgttacaactctaataacag

SEQ ID NO: 154615 - RNA, 22 nt, synthetic construct
  source 1..22: mol_type = other RNA
tgtgttacattgccttcgcagg

SEQ ID NO: 154616 - RNA, 22 nt, synthetic construct
  source 1..22: mol_type = other RNA
tgtgttccagacaaaaattttc

SEQ ID NO: 154617 - RNA, 22 nt, synthetic construct
  source 1..22: mol_type = other RNA
tgtgttccttcctacacatatc

SEQ ID NO: 154618 - RNA, 22 nt, synthetic construct
  source 1..22: mol_type = other RNA
tgtgttctctttttgacagatg

SEQ ID NO: 154619 - RNA, 22 nt, synthetic construct
  source 1..22: mol_type = other RNA
tgtgttctgccttgaggtgatt

SEQ ID NO: 154620 - RNA, 22 nt, synthetic construct
  source 1..22: mol_type = other RNA
tgtgttcttttccttcttaaga

SEQ ID NO: 154621 - RNA, 22 nt, synthetic construct
  source 1..22: mol_type = other RNA
tgtgttgaccttagtggttgac

SEQ ID NO: 154622 - RNA, 22 nt, synthetic construct
  source 1..22: mol_type = other RNA
tgtgttgactgacataactgta

SEQ ID NO: 154623 - RNA, 22 nt, synthetic construct
  source 1..22: mol_type = other RNA
tgtgttgataaatatgtgttac

SEQ ID NO: 154624 - RNA, 22 nt, synthetic construct
  source 1..22: mol_type = other RNA
tgtgttgcccacgctggtctca

SEQ ID NO: 154625 - RNA, 22 nt, synthetic construct
  source 1..22: mol_type = other RNA
tgtgttggcactgaagccagtc

SEQ ID NO: 154626 - RNA, 22 nt, synthetic construct
  source 1..22: mol_type = other RNA
tgtgttggtgtttctgacaggt

SEQ ID NO: 154627 - RNA, 22 nt, synthetic construct
  source 1..22: mol_type = other RNA
tgtgttgtctgattcagtttgc

SEQ ID NO: 154628 - RNA, 22 nt, synthetic construct
  source 1..22: mol_type = other RNA
tgtgttgtgcacacatccacgc

SEQ ID NO: 154629 - RNA, 22 nt, synthetic construct
  source 1..22: mol_type = other RNA
tgtgtttaatttccacccatga

SEQ ID NO: 154630 - RNA, 22 nt, synthetic construct
  source 1..22: mol_type = other RNA
tgtgtttatgaatgatgccatc

SEQ ID NO: 154631 - RNA, 22 nt, synthetic construct
  source 1..22: mol_type = other RNA
tgtgtttcgcaaagtaaaaagc

SEQ ID NO: 154632 - RNA, 22 nt, synthetic construct
  source 1..22: mol_type = other RNA
tgtgtttctgctattctctttc

SEQ ID NO: 154633 - RNA, 22 nt, synthetic construct
  source 1..22: mol_type = other RNA
tgtgtttgtgaccagatcaaac

SEQ ID NO: 154634 - RNA, 22 nt, synthetic construct
  source 1..22: mol_type = other RNA
tgtgtttgtttgctagagctgc

SEQ ID NO: 154635 - RNA, 22 nt, synthetic construct
  source 1..22: mol_type = other RNA
tgtgttttatttaggccctcta

SEQ ID NO: 154636 - RNA, 22 nt, synthetic construct
  source 1..22: mol_type = other RNA
tgtgttttatttggctgttacc

SEQ ID NO: 154637 - RNA, 22 nt, synthetic construct
  source 1..22: mol_type = other RNA
tgtgttttcactctcaatagtg

SEQ ID NO: 154638 - RNA, 22 nt, synthetic construct
  source 1..22: mol_type = other RNA
tgtgttttcattcgttcaaaac

SEQ ID NO: 154639 - RNA, 22 nt, synthetic construct
  source 1..22: mol_type = other RNA
tgtgttttgttgttgttgttgt

SEQ ID NO: 154640 - RNA, 22 nt, synthetic construct
  source 1..22: mol_type = other RNA
tgtgttttgttttgaataacct

SEQ ID NO: 154641 - RNA, 22 nt, synthetic construct
  source 1..22: mol_type = other RNA
tgtgtttttgtaaatgaaacac

SEQ ID NO: 154642 - RNA, 22 nt, synthetic construct
  source 1..22: mol_type = other RNA
tgttaaaaacttaagtatctcg

SEQ ID NO: 154643 - RNA, 22 nt, synthetic construct
  source 1..22: mol_type = other RNA
tgttaaaagatacgaaaatcct

SEQ ID NO: 154644 - RNA, 22 nt, synthetic construct
  source 1..22: mol_type = other RNA
tgttaaatgaaggaaaaaacgg

SEQ ID NO: 154645 - RNA, 22 nt, synthetic construct
  source 1..22: mol_type = other RNA
tgttaaatttgattgttagcca

SEQ ID NO: 154646 - RNA, 22 nt, synthetic construct
  source 1..22: mol_type = other RNA
tgttaacaattggtgaatctga

SEQ ID NO: 154647 - RNA, 22 nt, synthetic construct
  source 1..22: mol_type = other RNA
tgttaacatttcttctagtcac

SEQ ID NO: 154648 - RNA, 22 nt, synthetic construct
  source 1..22: mol_type = other RNA
tgttaactgacttacagacctt

SEQ ID NO: 154649 - RNA, 22 nt, synthetic construct
  source 1..22: mol_type = other RNA
tgttaactgtagagaaaatgtt

SEQ ID NO: 154650 - RNA, 22 nt, synthetic construct
  source 1..22: mol_type = other RNA
tgttaagattcaacaaaactgg

SEQ ID NO: 154651 - RNA, 22 nt, synthetic construct
  source 1..22: mol_type = other RNA
tgttaagcattttccggttgta

SEQ ID NO: 154652 - RNA, 22 nt, synthetic construct
  source 1..22: mol_type = other RNA
tgttaagcccaacttcacacca

SEQ ID NO: 154653 - RNA, 22 nt, synthetic construct
  source 1..22: mol_type = other RNA
tgttaagccgttccatcagaga

SEQ ID NO: 154654 - RNA, 22 nt, synthetic construct
  source 1..22: mol_type = other RNA
tgttaagtgtttgaaaagtgtt

SEQ ID NO: 154655 - RNA, 22 nt, synthetic construct
  source 1..22: mol_type = other RNA
tgttaataaccctgttttgtag

SEQ ID NO: 154656 - RNA, 22 nt, synthetic construct
  source 1..22: mol_type = other RNA
tgttaatagataggtcatgtac

SEQ ID NO: 154657 - RNA, 22 nt, synthetic construct
  source 1..22: mol_type = other RNA
tgttaatgggcacttgggatgt

SEQ ID NO: 154658 - RNA, 22 nt, synthetic construct
  source 1..22: mol_type = other RNA
tgttaatggttagactgcacat

SEQ ID NO: 154659 - RNA, 22 nt, synthetic construct
  source 1..22: mol_type = other RNA
tgttaatgtgatatgccacatt

SEQ ID NO: 154660 - RNA, 22 nt, synthetic construct
  source 1..22: mol_type = other RNA
tgttaattatttgtgcatactg

SEQ ID NO: 154661 - RNA, 22 nt, synthetic construct
  source 1..22: mol_type = other RNA
tgttacaactctaataacagcc

SEQ ID NO: 154662 - RNA, 22 nt, synthetic construct
  source 1..22: mol_type = other RNA
tgttacacaggtagacatgtgc

SEQ ID NO: 154663 - RNA, 22 nt, synthetic construct
  source 1..22: mol_type = other RNA
tgttacacttccagtacatctc

SEQ ID NO: 154664 - RNA, 22 nt, synthetic construct
  source 1..22: mol_type = other RNA
tgttacagcagctctagcaaac

SEQ ID NO: 154665 - RNA, 22 nt, synthetic construct
  source 1..22: mol_type = other RNA
tgttacagctcttctcagttgc

SEQ ID NO: 154666 - RNA, 22 nt, synthetic construct
  source 1..22: mol_type = other RNA
tgttacatggttctgtgctaga

SEQ ID NO: 154667 - RNA, 22 nt, synthetic construct
  source 1..22: mol_type = other RNA
tgttacattgccttcgcagggt

SEQ ID NO: 154668 - RNA, 22 nt, synthetic construct
  source 1..22: mol_type = other RNA
tgttaccatttgaccttccttg

SEQ ID NO: 154669 - RNA, 22 nt, synthetic construct
  source 1..22: mol_type = other RNA
tgttactcattatggttgttgg

SEQ ID NO: 154670 - RNA, 22 nt, synthetic construct
  source 1..22: mol_type = other RNA
tgttactcccgatttcagttaa

SEQ ID NO: 154671 - RNA, 22 nt, synthetic construct
  source 1..22: mol_type = other RNA
tgttactgatctgctcaagttt

SEQ ID NO: 154672 - RNA, 22 nt, synthetic construct
  source 1..22: mol_type = other RNA
tgttacttctcagctatagctt

SEQ ID NO: 154673 - RNA, 22 nt, synthetic construct
  source 1..22: mol_type = other RNA
tgttacttgaaatcatttcact

SEQ ID NO: 154674 - RNA, 22 nt, synthetic construct
  source 1..22: mol_type = other RNA
tgttacttgactattttaccct

SEQ ID NO: 154675 - RNA, 22 nt, synthetic construct
  source 1..22: mol_type = other RNA
tgttagaacaattttgaatgtg

SEQ ID NO: 154676 - RNA, 22 nt, synthetic construct
  source 1..22: mol_type = other RNA
tgttagaattacaggcatgagt

SEQ ID NO: 154677 - RNA, 22 nt, synthetic construct
  source 1..22: mol_type = other RNA
tgttagaattcaggacagttat

SEQ ID NO: 154678 - RNA, 22 nt, synthetic construct
  source 1..22: mol_type = other RNA
tgttagaattttgcttttgctt

SEQ ID NO: 154679 - RNA, 22 nt, synthetic construct
  source 1..22: mol_type = other RNA
tgttagatatcccatataaggg

SEQ ID NO: 154680 - RNA, 22 nt, synthetic construct
  source 1..22: mol_type = other RNA
tgttagatctgggataatgcta

SEQ ID NO: 154681 - RNA, 22 nt, synthetic construct
  source 1..22: mol_type = other RNA
tgttagatggtgctgatttaaa

SEQ ID NO: 154682 - RNA, 22 nt, synthetic construct
  source 1..22: mol_type = other RNA
tgttagattaggaaacagattg

SEQ ID NO: 154683 - RNA, 22 nt, synthetic construct
  source 1..22: mol_type = other RNA
tgttagcaggactggactcctt

SEQ ID NO: 154684 - RNA, 22 nt, synthetic construct
  source 1..22: mol_type = other RNA
tgttagccacagcgttgttcag

SEQ ID NO: 154685 - RNA, 22 nt, synthetic construct
  source 1..22: mol_type = other RNA
tgttagccttgccattctccca

SEQ ID NO: 154686 - RNA, 22 nt, synthetic construct
  source 1..22: mol_type = other RNA
tgttaggcaatccttccgcctc

SEQ ID NO: 154687 - RNA, 22 nt, synthetic construct
  source 1..22: mol_type = other RNA
tgttagggacttatggagataa

SEQ ID NO: 154688 - RNA, 22 nt, synthetic construct
  source 1..22: mol_type = other RNA
tgttaggtattattttcacaga

SEQ ID NO: 154689 - RNA, 22 nt, synthetic construct
  source 1..22: mol_type = other RNA
tgttaggtgctggcttcaatat

SEQ ID NO: 154690 - RNA, 22 nt, synthetic construct
  source 1..22: mol_type = other RNA
tgttaggttgaaagttcagaat

SEQ ID NO: 154691 - RNA, 22 nt, synthetic construct
  source 1..22: mol_type = other RNA
tgttagtaggaaaaccatgtca

SEQ ID NO: 154692 - RNA, 22 nt, synthetic construct
  source 1..22: mol_type = other RNA
tgttagtcccctagtggatgct

SEQ ID NO: 154693 - RNA, 22 nt, synthetic construct
  source 1..22: mol_type = other RNA
tgttagtgccttcagaaggagt

SEQ ID NO: 154694 - RNA, 22 nt, synthetic construct
  source 1..22: mol_type = other RNA
tgttataagcaaagatatgggt

SEQ ID NO: 154695 - RNA, 22 nt, synthetic construct
  source 1..22: mol_type = other RNA
tgttataatgagatagaccaga

SEQ ID NO: 154696 - RNA, 22 nt, synthetic construct
  source 1..22: mol_type = other RNA
tgttatacagcaaatctctaga

SEQ ID NO: 154697 - RNA, 22 nt, synthetic construct
  source 1..22: mol_type = other RNA
tgttatatccagattgatatct

SEQ ID NO: 154698 - RNA, 22 nt, synthetic construct
  source 1..22: mol_type = other RNA
tgttatatttccgtatccagtg

SEQ ID NO: 154699 - RNA, 22 nt, synthetic construct
  source 1..22: mol_type = other RNA
tgttatctgaacgtctttaaat

SEQ ID NO: 154700 - RNA, 22 nt, synthetic construct
  source 1..22: mol_type = other RNA
tgttatctgggaacagccccta

SEQ ID NO: 154701 - RNA, 22 nt, synthetic construct
  source 1..22: mol_type = other RNA
tgttatgaagcttttctcctaa

SEQ ID NO: 154702 - RNA, 22 nt, synthetic construct
  source 1..22: mol_type = other RNA
tgttatgacaagactacctaaa

SEQ ID NO: 154703 - RNA, 22 nt, synthetic construct
  source 1..22: mol_type = other RNA
tgttatgccccctcttctctcc

SEQ ID NO: 154704 - RNA, 22 nt, synthetic construct
  source 1..22: mol_type = other RNA
tgttatggtaggtgctttttgt

SEQ ID NO: 154705 - RNA, 22 nt, synthetic construct
  source 1..22: mol_type = other RNA
tgttattagagttgtaacacat

SEQ ID NO: 154706 - RNA, 22 nt, synthetic construct
  source 1..22: mol_type = other RNA
tgttattagggtaatgctggct

SEQ ID NO: 154707 - RNA, 22 nt, synthetic construct
  source 1..22: mol_type = other RNA
tgttatttggggattctgctac

SEQ ID NO: 154708 - RNA, 22 nt, synthetic construct
  source 1..22: mol_type = other RNA
tgttatttgttctgtcacggtg

SEQ ID NO: 154709 - RNA, 22 nt, synthetic construct
  source 1..22: mol_type = other RNA
tgttattttaatcgaatcctca

SEQ ID NO: 154710 - RNA, 22 nt, synthetic construct
  source 1..22: mol_type = other RNA
tgttcaaaaaccttttttaagg

SEQ ID NO: 154711 - RNA, 22 nt, synthetic construct
  source 1..22: mol_type = other RNA
tgttcaaaagccccaaaccatc

SEQ ID NO: 154712 - RNA, 22 nt, synthetic construct
  source 1..22: mol_type = other RNA
tgttcaaaatacagtgtttttg

SEQ ID NO: 154713 - RNA, 22 nt, synthetic construct
  source 1..22: mol_type = other RNA
tgttcaaccctcggcctctact

SEQ ID NO: 154714 - RNA, 22 nt, synthetic construct
  source 1..22: mol_type = other RNA
tgttcaagcgctgaagtacttc

SEQ ID NO: 154715 - RNA, 22 nt, synthetic construct
  source 1..22: mol_type = other RNA
tgttcaaggtgttcctgaagtc

SEQ ID NO: 154716 - RNA, 22 nt, synthetic construct
  source 1..22: mol_type = other RNA
tgttcaagtatttccacgggta

SEQ ID NO: 154717 - RNA, 22 nt, synthetic construct
  source 1..22: mol_type = other RNA
tgttcacatttcgccttctcag

SEQ ID NO: 154718 - RNA, 22 nt, synthetic construct
  source 1..22: mol_type = other RNA
tgttcactgcagaattactgac

SEQ ID NO: 154719 - RNA, 22 nt, synthetic construct
  source 1..22: mol_type = other RNA
tgttcagaaatagactcccaac

SEQ ID NO: 154720 - RNA, 22 nt, synthetic construct
  source 1..22: mol_type = other RNA
tgttcagatagaaaagacaata

SEQ ID NO: 154721 - RNA, 22 nt, synthetic construct
  source 1..22: mol_type = other RNA
tgttcaggagttttgcctcttt

SEQ ID NO: 154722 - RNA, 22 nt, synthetic construct
  source 1..22: mol_type = other RNA
tgttcagggaaggctgcaagca

SEQ ID NO: 154723 - RNA, 22 nt, synthetic construct
  source 1..22: mol_type = other RNA
tgttcagttgaaaagtatggtt

SEQ ID NO: 154724 - RNA, 22 nt, synthetic construct
  source 1..22: mol_type = other RNA
tgttcagtttatgggtcaacca

SEQ ID NO: 154725 - RNA, 22 nt, synthetic construct
  source 1..22: mol_type = other RNA
tgttcatcatcttttgcctgga

SEQ ID NO: 154726 - RNA, 22 nt, synthetic construct
  source 1..22: mol_type = other RNA
tgttcatgaaatcccctttagt

SEQ ID NO: 154727 - RNA, 22 nt, synthetic construct
  source 1..22: mol_type = other RNA
tgttcatgaaccttcaccaaag

SEQ ID NO: 154728 - RNA, 22 nt, synthetic construct
  source 1..22: mol_type = other RNA
tgttcatgggaagatgctccct

SEQ ID NO: 154729 - RNA, 22 nt, synthetic construct
  source 1..22: mol_type = other RNA
tgttcatgtctgtgtagttcat

SEQ ID NO: 154730 - RNA, 22 nt, synthetic construct
  source 1..22: mol_type = other RNA
tgttcattcatctgttaatggg

SEQ ID NO: 154731 - RNA, 22 nt, synthetic construct
  source 1..22: mol_type = other RNA
tgttcatttgagaatttcaggt

SEQ ID NO: 154732 - RNA, 22 nt, synthetic construct
  source 1..22: mol_type = other RNA
tgttccacatgttactcattat

SEQ ID NO: 154733 - RNA, 22 nt, synthetic construct
  source 1..22: mol_type = other RNA
tgttccagacaaaaattttcat

SEQ ID NO: 154734 - RNA, 22 nt, synthetic construct
  source 1..22: mol_type = other RNA
tgttccaggcctcgctcttggc

SEQ ID NO: 154735 - RNA, 22 nt, synthetic construct
  source 1..22: mol_type = other RNA
tgttccaggggggaaaaaacca

SEQ ID NO: 154736 - RNA, 22 nt, synthetic construct
  source 1..22: mol_type = other RNA
tgttccatcggtctgtatttct

SEQ ID NO: 154737 - RNA, 22 nt, synthetic construct
  source 1..22: mol_type = other RNA
tgttcccaagcaagtgtggtgg

SEQ ID NO: 154738 - RNA, 22 nt, synthetic construct
  source 1..22: mol_type = other RNA
tgttcccagataacagtggtta

SEQ ID NO: 154739 - RNA, 22 nt, synthetic construct
  source 1..22: mol_type = other RNA
tgttccccaagccaaattaata

SEQ ID NO: 154740 - RNA, 22 nt, synthetic construct
  source 1..22: mol_type = other RNA
tgttcccggattggaaaactag

SEQ ID NO: 154741 - RNA, 22 nt, synthetic construct
  source 1..22: mol_type = other RNA
tgttccctagaacttaaaatat

SEQ ID NO: 154742 - RNA, 22 nt, synthetic construct
  source 1..22: mol_type = other RNA
tgttccctcttcaatattttgg

SEQ ID NO: 154743 - RNA, 22 nt, synthetic construct
  source 1..22: mol_type = other RNA
tgttcccttcttaaatgtgaat

SEQ ID NO: 154744 - RNA, 22 nt, synthetic construct
  source 1..22: mol_type = other RNA
tgttccgattttacttactagt

SEQ ID NO: 154745 - RNA, 22 nt, synthetic construct
  source 1..22: mol_type = other RNA
tgttccgggatcctgtccaggc

SEQ ID NO: 154746 - RNA, 22 nt, synthetic construct
  source 1..22: mol_type = other RNA
tgttcctatatttttccacata

SEQ ID NO: 154747 - RNA, 22 nt, synthetic construct
  source 1..22: mol_type = other RNA
tgttcctgaagtctttggtgat

SEQ ID NO: 154748 - RNA, 22 nt, synthetic construct
  source 1..22: mol_type = other RNA
tgttcctgggttctcccttcta

SEQ ID NO: 154749 - RNA, 22 nt, synthetic construct
  source 1..22: mol_type = other RNA
tgttccttcctacacatatctt

SEQ ID NO: 154750 - RNA, 22 nt, synthetic construct
  source 1..22: mol_type = other RNA
tgttctaaagttagaagtatcc

SEQ ID NO: 154751 - RNA, 22 nt, synthetic construct
  source 1..22: mol_type = other RNA
tgttctaatttgtgaaccttga

SEQ ID NO: 154752 - RNA, 22 nt, synthetic construct
  source 1..22: mol_type = other RNA
tgttctagctcctgggaaaagg

SEQ ID NO: 154753 - RNA, 22 nt, synthetic construct
  source 1..22: mol_type = other RNA
tgttctcagtatcctttcaagg

SEQ ID NO: 154754 - RNA, 22 nt, synthetic construct
  source 1..22: mol_type = other RNA
tgttctccagtcccactgacag

SEQ ID NO: 154755 - RNA, 22 nt, synthetic construct
  source 1..22: mol_type = other RNA
tgttctcgttcatgttcaaggt

SEQ ID NO: 154756 - RNA, 22 nt, synthetic construct
  source 1..22: mol_type = other RNA
tgttctctgtgtggtttgcctt

SEQ ID NO: 154757 - RNA, 22 nt, synthetic construct
  source 1..22: mol_type = other RNA
tgttctctttgtttatccttgc

SEQ ID NO: 154758 - RNA, 22 nt, synthetic construct
  source 1..22: mol_type = other RNA
tgttctcttttcctcgttttca

SEQ ID NO: 154759 - RNA, 22 nt, synthetic construct
  source 1..22: mol_type = other RNA
tgttctctttttgacagatgag

SEQ ID NO: 154760 - RNA, 22 nt, synthetic construct
  source 1..22: mol_type = other RNA
tgttctgccttgaggtgattca

SEQ ID NO: 154761 - RNA, 22 nt, synthetic construct
  source 1..22: mol_type = other RNA
tgttctgctgttgatggacgtt

SEQ ID NO: 154762 - RNA, 22 nt, synthetic construct
  source 1..22: mol_type = other RNA
tgttctgtcacatttgaaagaa

SEQ ID NO: 154763 - RNA, 22 nt, synthetic construct
  source 1..22: mol_type = other RNA
tgttctgtcacggtgccctaca

SEQ ID NO: 154764 - RNA, 22 nt, synthetic construct
  source 1..22: mol_type = other RNA
tgttctgtgtttatgaatgatg

SEQ ID NO: 154765 - RNA, 22 nt, synthetic construct
  source 1..22: mol_type = other RNA
tgttctgttccatcggtctgta

SEQ ID NO: 154766 - RNA, 22 nt, synthetic construct
  source 1..22: mol_type = other RNA
tgttcttggttaatattacaga

SEQ ID NO: 154767 - RNA, 22 nt, synthetic construct
  source 1..22: mol_type = other RNA
tgttctttggagctgtattttt

SEQ ID NO: 154768 - RNA, 22 nt, synthetic construct
  source 1..22: mol_type = other RNA
tgttcttttcaaaaacagcata

SEQ ID NO: 154769 - RNA, 22 nt, synthetic construct
  source 1..22: mol_type = other RNA
tgttcttttccttcttaagaca

SEQ ID NO: 154770 - RNA, 22 nt, synthetic construct
  source 1..22: mol_type = other RNA
tgttcttttgtaatctaaggat

SEQ ID NO: 154771 - RNA, 22 nt, synthetic construct
  source 1..22: mol_type = other RNA
tgttgaaaacgaggaaaagaga

SEQ ID NO: 154772 - RNA, 22 nt, synthetic construct
  source 1..22: mol_type = other RNA
tgttgaatagcaactgtttttt

SEQ ID NO: 154773 - RNA, 22 nt, synthetic construct
  source 1..22: mol_type = other RNA
tgttgaatcttaacatttctca

SEQ ID NO: 154774 - RNA, 22 nt, synthetic construct
  source 1..22: mol_type = other RNA
tgttgaatgtggcagaatttac

SEQ ID NO: 154775 - RNA, 22 nt, synthetic construct
  source 1..22: mol_type = other RNA
tgttgaattgttgcgcgtcaaa

SEQ ID NO: 154776 - RNA, 22 nt, synthetic construct
  source 1..22: mol_type = other RNA
tgttgaattgttggagttcttt

SEQ ID NO: 154777 - RNA, 22 nt, synthetic construct
  source 1..22: mol_type = other RNA
tgttgacatcctttgcgtctgt

SEQ ID NO: 154778 - RNA, 22 nt, synthetic construct
  source 1..22: mol_type = other RNA
tgttgacatcttgcataactcg

SEQ ID NO: 154779 - RNA, 22 nt, synthetic construct
  source 1..22: mol_type = other RNA
tgttgacccaatcatgttcttt

SEQ ID NO: 154780 - RNA, 22 nt, synthetic construct
  source 1..22: mol_type = other RNA
tgttgaccttagtggttgaccc

SEQ ID NO: 154781 - RNA, 22 nt, synthetic construct
  source 1..22: mol_type = other RNA
tgttgactaccatctctccaac

SEQ ID NO: 154782 - RNA, 22 nt, synthetic construct
  source 1..22: mol_type = other RNA
tgttgactgaattaatctctta

SEQ ID NO: 154783 - RNA, 22 nt, synthetic construct
  source 1..22: mol_type = other RNA
tgttgactgacataactgtaaa

SEQ ID NO: 154784 - RNA, 22 nt, synthetic construct
  source 1..22: mol_type = other RNA
tgttgagaaagcacataaaaaa

SEQ ID NO: 154785 - RNA, 22 nt, synthetic construct
  source 1..22: mol_type = other RNA
tgttgagaggctttaagcagaa

SEQ ID NO: 154786 - RNA, 22 nt, synthetic construct
  source 1..22: mol_type = other RNA
tgttgaggatgactgtcctgaa

SEQ ID NO: 154787 - RNA, 22 nt, synthetic construct
  source 1..22: mol_type = other RNA
tgttgaggctgggccctgtggc

SEQ ID NO: 154788 - RNA, 22 nt, synthetic construct
  source 1..22: mol_type = other RNA
tgttgagtatcttttcatgttg

SEQ ID NO: 154789 - RNA, 22 nt, synthetic construct
  source 1..22: mol_type = other RNA
tgttgagtcttgtttacccagt

SEQ ID NO: 154790 - RNA, 22 nt, synthetic construct
  source 1..22: mol_type = other RNA
tgttgatggacgtttgagttgt

SEQ ID NO: 154791 - RNA, 22 nt, synthetic construct
  source 1..22: mol_type = other RNA
tgttgatgtaatggatcaaggc

SEQ ID NO: 154792 - RNA, 22 nt, synthetic construct
  source 1..22: mol_type = other RNA
tgttgattgttgccatcatttt

SEQ ID NO: 154793 - RNA, 22 nt, synthetic construct
  source 1..22: mol_type = other RNA
tgttgatttagaaatacctgca

SEQ ID NO: 154794 - RNA, 22 nt, synthetic construct
  source 1..22: mol_type = other RNA
tgttgattttgaggcagagaga

SEQ ID NO: 154795 - RNA, 22 nt, synthetic construct
  source 1..22: mol_type = other RNA
tgttgcaaattattttcctcct

SEQ ID NO: 154796 - RNA, 22 nt, synthetic construct
  source 1..22: mol_type = other RNA
tgttgcacaaaagtgaaaacta

SEQ ID NO: 154797 - RNA, 22 nt, synthetic construct
  source 1..22: mol_type = other RNA
tgttgcagagactggatagcaa

SEQ ID NO: 154798 - RNA, 22 nt, synthetic construct
  source 1..22: mol_type = other RNA
tgttgcagtccccggtctttcc

SEQ ID NO: 154799 - RNA, 22 nt, synthetic construct
  source 1..22: mol_type = other RNA
tgttgcatccccattcaattgt

SEQ ID NO: 154800 - RNA, 22 nt, synthetic construct
  source 1..22: mol_type = other RNA
tgttgccaatatctatcagggc

SEQ ID NO: 154801 - RNA, 22 nt, synthetic construct
  source 1..22: mol_type = other RNA
tgttgccaggtggacgcggccc

SEQ ID NO: 154802 - RNA, 22 nt, synthetic construct
  source 1..22: mol_type = other RNA
tgttgccatcattttatgaaac

SEQ ID NO: 154803 - RNA, 22 nt, synthetic construct
  source 1..22: mol_type = other RNA
tgttgcccagactggagttcac

SEQ ID NO: 154804 - RNA, 22 nt, synthetic construct
  source 1..22: mol_type = other RNA
tgttgcctactagccagtgatt

SEQ ID NO: 154805 - RNA, 22 nt, synthetic construct
  source 1..22: mol_type = other RNA
tgttgcctctgtgctagccttc

SEQ ID NO: 154806 - RNA, 22 nt, synthetic construct
  source 1..22: mol_type = other RNA
tgttgcctgtagttttggtgtc

SEQ ID NO: 154807 - RNA, 22 nt, synthetic construct
  source 1..22: mol_type = other RNA
tgttgcgcgtcaaaagatgctg

SEQ ID NO: 154808 - RNA, 22 nt, synthetic construct
  source 1..22: mol_type = other RNA
tgttgcggtgagcagagatcac

SEQ ID NO: 154809 - RNA, 22 nt, synthetic construct
  source 1..22: mol_type = other RNA
tgttgctattgttgaattgttg

SEQ ID NO: 154810 - RNA, 22 nt, synthetic construct
  source 1..22: mol_type = other RNA
tgttgcttaagtcactccattt

SEQ ID NO: 154811 - RNA, 22 nt, synthetic construct
  source 1..22: mol_type = other RNA
tgttgcttgctctacaaacctt

SEQ ID NO: 154812 - RNA, 22 nt, synthetic construct
  source 1..22: mol_type = other RNA
tgttgcttggtgttgactgaat

SEQ ID NO: 154813 - RNA, 22 nt, synthetic construct
  source 1..22: mol_type = other RNA
tgttgctttaacctctggtatt

SEQ ID NO: 154814 - RNA, 22 nt, synthetic construct
  source 1..22: mol_type = other RNA
tgttgctttgcgaaatagtagt

SEQ ID NO: 154815 - RNA, 22 nt, synthetic construct
  source 1..22: mol_type = other RNA
tgttggaaaaatcgtcctcttc

SEQ ID NO: 154816 - RNA, 22 nt, synthetic construct
  source 1..22: mol_type = other RNA
tgttggacagctgggagaaagc

SEQ ID NO: 154817 - RNA, 22 nt, synthetic construct
  source 1..22: mol_type = other RNA
tgttggagagatggtagtcaac

SEQ ID NO: 154818 - RNA, 22 nt, synthetic construct
  source 1..22: mol_type = other RNA
tgttggatagtttctcaactta

SEQ ID NO: 154819 - RNA, 22 nt, synthetic construct
  source 1..22: mol_type = other RNA
tgttggcactgaagccagtcct

SEQ ID NO: 154820 - RNA, 22 nt, synthetic construct
  source 1..22: mol_type = other RNA
tgttggcctggacacacacagt

SEQ ID NO: 154821 - RNA, 22 nt, synthetic construct
  source 1..22: mol_type = other RNA
tgttggctaaaagaccgcaaga

SEQ ID NO: 154822 - RNA, 22 nt, synthetic construct
  source 1..22: mol_type = other RNA
tgttgggaggtttttgattact

SEQ ID NO: 154823 - RNA, 22 nt, synthetic construct
  source 1..22: mol_type = other RNA
tgttgggccaacttccagcaag

SEQ ID NO: 154824 - RNA, 22 nt, synthetic construct
  source 1..22: mol_type = other RNA
tgttgggctattaagtattgca

SEQ ID NO: 154825 - RNA, 22 nt, synthetic construct
  source 1..22: mol_type = other RNA
tgttgggtaaaaataatcaact

SEQ ID NO: 154826 - RNA, 22 nt, synthetic construct
  source 1..22: mol_type = other RNA
tgttgggtttaactgaggtgtt

SEQ ID NO: 154827 - RNA, 22 nt, synthetic construct
  source 1..22: mol_type = other RNA
tgttggtgagaacccagtgtct

SEQ ID NO: 154828 - RNA, 22 nt, synthetic construct
  source 1..22: mol_type = other RNA
tgttggtgcatttgggacagcc

SEQ ID NO: 154829 - RNA, 22 nt, synthetic construct
  source 1..22: mol_type = other RNA
tgttggtgcttagctgcctctt

SEQ ID NO: 154830 - RNA, 22 nt, synthetic construct
  source 1..22: mol_type = other RNA
tgttggtgtttctgacaggtgg

SEQ ID NO: 154831 - RNA, 22 nt, synthetic construct
  source 1..22: mol_type = other RNA
tgttggttagtgttgtttttaa

SEQ ID NO: 154832 - RNA, 22 nt, synthetic construct
  source 1..22: mol_type = other RNA
tgttggtttgtgtgtttgtgaa

SEQ ID NO: 154833 - RNA, 22 nt, synthetic construct
  source 1..22: mol_type = other RNA
tgttgtaatgttacttctcagc

SEQ ID NO: 154834 - RNA, 22 nt, synthetic construct
  source 1..22: mol_type = other RNA
tgttgtacatttaaaattgcag

SEQ ID NO: 154835 - RNA, 22 nt, synthetic construct
  source 1..22: mol_type = other RNA
tgttgtattttacaccatgcag

SEQ ID NO: 154836 - RNA, 22 nt, synthetic construct
  source 1..22: mol_type = other RNA
tgttgtctgattcagtttgcta

SEQ ID NO: 154837 - RNA, 22 nt, synthetic construct
  source 1..22: mol_type = other RNA
tgttgtgaggattcgattaaaa

SEQ ID NO: 154838 - RNA, 22 nt, synthetic construct
  source 1..22: mol_type = other RNA
tgttgtgcacacatccacgcgt

SEQ ID NO: 154839 - RNA, 22 nt, synthetic construct
  source 1..22: mol_type = other RNA
tgttgtggatgtccttaatgcc

SEQ ID NO: 154840 - RNA, 22 nt, synthetic construct
  source 1..22: mol_type = other RNA
tgttgtgtagaaatgtggagat

SEQ ID NO: 154841 - RNA, 22 nt, synthetic construct
  source 1..22: mol_type = other RNA
tgttgtgtgcacctaataaaat

SEQ ID NO: 154842 - RNA, 22 nt, synthetic construct
  source 1..22: mol_type = other RNA
tgttgtgtgttaaatttgattg

SEQ ID NO: 154843 - RNA, 22 nt, synthetic construct
  source 1..22: mol_type = other RNA
tgttgtgttttcattcgttcaa

SEQ ID NO: 154844 - RNA, 22 nt, synthetic construct
  source 1..22: mol_type = other RNA
tgttgttcttttcaaaaacagc

SEQ ID NO: 154845 - RNA, 22 nt, synthetic construct
  source 1..22: mol_type = other RNA
tgttgttgaatgtggcagaatt

SEQ ID NO: 154846 - RNA, 22 nt, synthetic construct
  source 1..22: mol_type = other RNA
tgttgttggtttgtgtgtttgt

SEQ ID NO: 154847 - RNA, 22 nt, synthetic construct
  source 1..22: mol_type = other RNA
tgttgttgttgtttctgagcca

SEQ ID NO: 154848 - RNA, 22 nt, synthetic construct
  source 1..22: mol_type = other RNA
tgttgttgtttctgagccagag

SEQ ID NO: 154849 - RNA, 22 nt, synthetic construct
  source 1..22: mol_type = other RNA
tgttgtttctgagccagagttt

SEQ ID NO: 154850 - RNA, 22 nt, synthetic construct
  source 1..22: mol_type = other RNA
tgtttaaaaacaacactaacca

SEQ ID NO: 154851 - RNA, 22 nt, synthetic construct
  source 1..22: mol_type = other RNA
tgtttaaaaagaaaaagctcac

SEQ ID NO: 154852 - RNA, 22 nt, synthetic construct
  source 1..22: mol_type = other RNA
tgtttaactatcctatgtgggg

SEQ ID NO: 154853 - RNA, 22 nt, synthetic construct
  source 1..22: mol_type = other RNA
tgtttaattacccaggcatgat

SEQ ID NO: 154854 - RNA, 22 nt, synthetic construct
  source 1..22: mol_type = other RNA
tgtttaattagccgggtgtagt

SEQ ID NO: 154855 - RNA, 22 nt, synthetic construct
  source 1..22: mol_type = other RNA
tgtttaattcctactttcttca

SEQ ID NO: 154856 - RNA, 22 nt, synthetic construct
  source 1..22: mol_type = other RNA
tgtttaattctgtttaccctta

SEQ ID NO: 154857 - RNA, 22 nt, synthetic construct
  source 1..22: mol_type = other RNA
tgtttaatttccacccatgaag

SEQ ID NO: 154858 - RNA, 22 nt, synthetic construct
  source 1..22: mol_type = other RNA
tgtttacacacctgaaattctc

SEQ ID NO: 154859 - RNA, 22 nt, synthetic construct
  source 1..22: mol_type = other RNA
tgtttacagtagccaaaggtag

SEQ ID NO: 154860 - RNA, 22 nt, synthetic construct
  source 1..22: mol_type = other RNA
tgtttacattagagaagaatga

SEQ ID NO: 154861 - RNA, 22 nt, synthetic construct
  source 1..22: mol_type = other RNA
tgtttaccaagggtgtgtttaa

SEQ ID NO: 154862 - RNA, 22 nt, synthetic construct
  source 1..22: mol_type = other RNA
tgtttacccagtgtgtttgttt

SEQ ID NO: 154863 - RNA, 22 nt, synthetic construct
  source 1..22: mol_type = other RNA
tgtttacccttactaaattttg

SEQ ID NO: 154864 - RNA, 22 nt, synthetic construct
  source 1..22: mol_type = other RNA
tgtttacttgggtataaatgat

SEQ ID NO: 154865 - RNA, 22 nt, synthetic construct
  source 1..22: mol_type = other RNA
tgtttagcaagattactggata

SEQ ID NO: 154866 - RNA, 22 nt, synthetic construct
  source 1..22: mol_type = other RNA
tgtttagcatctagcacagaac

SEQ ID NO: 154867 - RNA, 22 nt, synthetic construct
  source 1..22: mol_type = other RNA
tgtttagcggaatgactataga

SEQ ID NO: 154868 - RNA, 22 nt, synthetic construct
  source 1..22: mol_type = other RNA
tgtttaggatataagagtgggc

SEQ ID NO: 154869 - RNA, 22 nt, synthetic construct
  source 1..22: mol_type = other RNA
tgtttagggacgaatgcatggg

SEQ ID NO: 154870 - RNA, 22 nt, synthetic construct
  source 1..22: mol_type = other RNA
tgtttagtagaattctccagtg

SEQ ID NO: 154871 - RNA, 22 nt, synthetic construct
  source 1..22: mol_type = other RNA
tgtttagtagctgtctttaatg

SEQ ID NO: 154872 - RNA, 22 nt, synthetic construct
  source 1..22: mol_type = other RNA
tgtttatccttgcaccaactcc

SEQ ID NO: 154873 - RNA, 22 nt, synthetic construct
  source 1..22: mol_type = other RNA
tgtttatgaatgatgccatcac

SEQ ID NO: 154874 - RNA, 22 nt, synthetic construct
  source 1..22: mol_type = other RNA
tgtttatttgctgtcaggcaag

SEQ ID NO: 154875 - RNA, 22 nt, synthetic construct
  source 1..22: mol_type = other RNA
tgtttcacttttctggttttct

SEQ ID NO: 154876 - RNA, 22 nt, synthetic construct
  source 1..22: mol_type = other RNA
tgtttcagtgtgtccacacaat

SEQ ID NO: 154877 - RNA, 22 nt, synthetic construct
  source 1..22: mol_type = other RNA
tgtttcatttacaaaaacacac

SEQ ID NO: 154878 - RNA, 22 nt, synthetic construct
  source 1..22: mol_type = other RNA
tgtttccactttgaggttatta

SEQ ID NO: 154879 - RNA, 22 nt, synthetic construct
  source 1..22: mol_type = other RNA
tgtttccataaaaagcgttgga

SEQ ID NO: 154880 - RNA, 22 nt, synthetic construct
  source 1..22: mol_type = other RNA
tgtttccatgtcttggctattg

SEQ ID NO: 154881 - RNA, 22 nt, synthetic construct
  source 1..22: mol_type = other RNA
tgtttcccttaaaaggaactaa

SEQ ID NO: 154882 - RNA, 22 nt, synthetic construct
  source 1..22: mol_type = other RNA
tgtttcccttaatgttgacatc

SEQ ID NO: 154883 - RNA, 22 nt, synthetic construct
  source 1..22: mol_type = other RNA
tgtttcctaatctaacatgtta

SEQ ID NO: 154884 - RNA, 22 nt, synthetic construct
  source 1..22: mol_type = other RNA
tgtttcctagattccctctggc

SEQ ID NO: 154885 - RNA, 22 nt, synthetic construct
  source 1..22: mol_type = other RNA
tgtttccttaccagtgcttgca

SEQ ID NO: 154886 - RNA, 22 nt, synthetic construct
  source 1..22: mol_type = other RNA
tgtttccttccagatgttttac

SEQ ID NO: 154887 - RNA, 22 nt, synthetic construct
  source 1..22: mol_type = other RNA
tgtttcgcaaagtaaaaagcac

SEQ ID NO: 154888 - RNA, 22 nt, synthetic construct
  source 1..22: mol_type = other RNA
tgtttctacctttggctactgt

SEQ ID NO: 154889 - RNA, 22 nt, synthetic construct
  source 1..22: mol_type = other RNA
tgtttctcattcttctctaatg

SEQ ID NO: 154890 - RNA, 22 nt, synthetic construct
  source 1..22: mol_type = other RNA
tgtttctcctgcatggggagtt

SEQ ID NO: 154891 - RNA, 22 nt, synthetic construct
  source 1..22: mol_type = other RNA
tgtttctctacatctggatcct

SEQ ID NO: 154892 - RNA, 22 nt, synthetic construct
  source 1..22: mol_type = other RNA
tgtttctgacaggtggtatggg

SEQ ID NO: 154893 - RNA, 22 nt, synthetic construct
  source 1..22: mol_type = other RNA
tgtttctgagccagagtttcac

SEQ ID NO: 154894 - RNA, 22 nt, synthetic construct
  source 1..22: mol_type = other RNA
tgtttctgaggtggagttctgc

SEQ ID NO: 154895 - RNA, 22 nt, synthetic construct
  source 1..22: mol_type = other RNA
tgtttctgctattctctttctg

SEQ ID NO: 154896 - RNA, 22 nt, synthetic construct
  source 1..22: mol_type = other RNA
tgtttctgtgaaaaaacaaaac

SEQ ID NO: 154897 - RNA, 22 nt, synthetic construct
  source 1..22: mol_type = other RNA
tgtttcttagctatattcactt

SEQ ID NO: 154898 - RNA, 22 nt, synthetic construct
  source 1..22: mol_type = other RNA
tgtttcttttcactctaatatg

SEQ ID NO: 154899 - RNA, 22 nt, synthetic construct
  source 1..22: mol_type = other RNA
tgtttgaaaagtgtttgtcaca

SEQ ID NO: 154900 - RNA, 22 nt, synthetic construct
  source 1..22: mol_type = other RNA
tgtttgaaatttaaagacgttc

SEQ ID NO: 154901 - RNA, 22 nt, synthetic construct
  source 1..22: mol_type = other RNA
tgtttgaattaagcaccactag

SEQ ID NO: 154902 - RNA, 22 nt, synthetic construct
  source 1..22: mol_type = other RNA
tgtttgaattttccattcacac

SEQ ID NO: 154903 - RNA, 22 nt, synthetic construct
  source 1..22: mol_type = other RNA
tgtttgagaagtcttttcctac

SEQ ID NO: 154904 - RNA, 22 nt, synthetic construct
  source 1..22: mol_type = other RNA
tgtttgagctgaaagtaaagat

SEQ ID NO: 154905 - RNA, 22 nt, synthetic construct
  source 1..22: mol_type = other RNA
tgtttgaggctgggagtacaag

SEQ ID NO: 154906 - RNA, 22 nt, synthetic construct
  source 1..22: mol_type = other RNA
tgtttgattactgtagcttcgt

SEQ ID NO: 154907 - RNA, 22 nt, synthetic construct
  source 1..22: mol_type = other RNA
tgtttgattagttgactcctaa

SEQ ID NO: 154908 - RNA, 22 nt, synthetic construct
  source 1..22: mol_type = other RNA
tgtttgccatcttcaagatttc

SEQ ID NO: 154909 - RNA, 22 nt, synthetic construct
  source 1..22: mol_type = other RNA
tgtttgcctgcgtccgtagacc

SEQ ID NO: 154910 - RNA, 22 nt, synthetic construct
  source 1..22: mol_type = other RNA
tgtttgctaataatgatgacta

SEQ ID NO: 154911 - RNA, 22 nt, synthetic construct
  source 1..22: mol_type = other RNA
tgtttgctagagctgctgtaac

SEQ ID NO: 154912 - RNA, 22 nt, synthetic construct
  source 1..22: mol_type = other RNA
tgtttggatgaaaaagtactgg

SEQ ID NO: 154913 - RNA, 22 nt, synthetic construct
  source 1..22: mol_type = other RNA
tgtttggctccttaccactata

SEQ ID NO: 154914 - RNA, 22 nt, synthetic construct
  source 1..22: mol_type = other RNA
tgtttggctgggagcttatcag

SEQ ID NO: 154915 - RNA, 22 nt, synthetic construct
  source 1..22: mol_type = other RNA
tgtttggtagatttctgcatag

SEQ ID NO: 154916 - RNA, 22 nt, synthetic construct
  source 1..22: mol_type = other RNA
tgtttggtcaattgatctgcca

SEQ ID NO: 154917 - RNA, 22 nt, synthetic construct
  source 1..22: mol_type = other RNA
tgtttgtaacttgttcatgttt

SEQ ID NO: 154918 - RNA, 22 nt, synthetic construct
  source 1..22: mol_type = other RNA
tgtttgtacttctaccttgaaa

SEQ ID NO: 154919 - RNA, 22 nt, synthetic construct
  source 1..22: mol_type = other RNA
tgtttgtcacatagaagcgctc

SEQ ID NO: 154920 - RNA, 22 nt, synthetic construct
  source 1..22: mol_type = other RNA
tgtttgtgaagatacaaatagt

SEQ ID NO: 154921 - RNA, 22 nt, synthetic construct
  source 1..22: mol_type = other RNA
tgtttgtgaccagatcaaacgt

SEQ ID NO: 154922 - RNA, 22 nt, synthetic construct
  source 1..22: mol_type = other RNA
tgtttgtggttttaacctcttg

SEQ ID NO: 154923 - RNA, 22 nt, synthetic construct
  source 1..22: mol_type = other RNA
tgtttgttgggtttaactgagg

SEQ ID NO: 154924 - RNA, 22 nt, synthetic construct
  source 1..22: mol_type = other RNA
tgtttgtttaattagccgggtg

SEQ ID NO: 154925 - RNA, 22 nt, synthetic construct
  source 1..22: mol_type = other RNA
tgtttgtttctgaggtggagtt

SEQ ID NO: 154926 - RNA, 22 nt, synthetic construct
  source 1..22: mol_type = other RNA
tgtttgtttgctagagctgctg

SEQ ID NO: 154927 - RNA, 22 nt, synthetic construct
  source 1..22: mol_type = other RNA
tgttttaaagcagggaggggtc

SEQ ID NO: 154928 - RNA, 22 nt, synthetic construct
  source 1..22: mol_type = other RNA
tgttttaaggcagggcttggtg

SEQ ID NO: 154929 - RNA, 22 nt, synthetic construct
  source 1..22: mol_type = other RNA
tgttttacacatgtcagccaca

SEQ ID NO: 154930 - RNA, 22 nt, synthetic construct
  source 1..22: mol_type = other RNA
tgttttacatgtttaactatcc

SEQ ID NO: 154931 - RNA, 22 nt, synthetic construct
  source 1..22: mol_type = other RNA
tgttttaccatctaaagccagg

SEQ ID NO: 154932 - RNA, 22 nt, synthetic construct
  source 1..22: mol_type = other RNA
tgttttaggagtcaactaatca

SEQ ID NO: 154933 - RNA, 22 nt, synthetic construct
  source 1..22: mol_type = other RNA
tgttttaggggggaaaacaccc

SEQ ID NO: 154934 - RNA, 22 nt, synthetic construct
  source 1..22: mol_type = other RNA
tgttttaggtagtcttgtcata

SEQ ID NO: 154935 - RNA, 22 nt, synthetic construct
  source 1..22: mol_type = other RNA
tgttttagtggctcacagtgct

SEQ ID NO: 154936 - RNA, 22 nt, synthetic construct
  source 1..22: mol_type = other RNA
tgttttatttagcccatgtcta

SEQ ID NO: 154937 - RNA, 22 nt, synthetic construct
  source 1..22: mol_type = other RNA
tgttttatttaggccctctata

SEQ ID NO: 154938 - RNA, 22 nt, synthetic construct
  source 1..22: mol_type = other RNA
tgttttatttcttgacctcagt

SEQ ID NO: 154939 - RNA, 22 nt, synthetic construct
  source 1..22: mol_type = other RNA
tgttttatttggctgttaccat

SEQ ID NO: 154940 - RNA, 22 nt, synthetic construct
  source 1..22: mol_type = other RNA
tgttttcactctcaatagtgtc

SEQ ID NO: 154941 - RNA, 22 nt, synthetic construct
  source 1..22: mol_type = other RNA
tgttttcagttgcatgaatttg

SEQ ID NO: 154942 - RNA, 22 nt, synthetic construct
  source 1..22: mol_type = other RNA
tgttttcatgcgacatatcagg

SEQ ID NO: 154943 - RNA, 22 nt, synthetic construct
  source 1..22: mol_type = other RNA
tgttttcattcgttcaaaacat

SEQ ID NO: 154944 - RNA, 22 nt, synthetic construct
  source 1..22: mol_type = other RNA
tgttttcatttattctgttgca

SEQ ID NO: 154945 - RNA, 22 nt, synthetic construct
  source 1..22: mol_type = other RNA
tgttttccacagtgactttact

SEQ ID NO: 154946 - RNA, 22 nt, synthetic construct
  source 1..22: mol_type = other RNA
tgttttcccccctaaaacactg

SEQ ID NO: 154947 - RNA, 22 nt, synthetic construct
  source 1..22: mol_type = other RNA
tgttttcccttttgtagctaat

SEQ ID NO: 154948 - RNA, 22 nt, synthetic construct
  source 1..22: mol_type = other RNA
tgttttccgtgtgacaaaaagt

SEQ ID NO: 154949 - RNA, 22 nt, synthetic construct
  source 1..22: mol_type = other RNA
tgttttctaaaccttaaaagag

SEQ ID NO: 154950 - RNA, 22 nt, synthetic construct
  source 1..22: mol_type = other RNA
tgttttctccttctggaagatt

SEQ ID NO: 154951 - RNA, 22 nt, synthetic construct
  source 1..22: mol_type = other RNA
tgttttcttattttttcccaga

SEQ ID NO: 154952 - RNA, 22 nt, synthetic construct
  source 1..22: mol_type = other RNA
tgttttcttcatggactagact

SEQ ID NO: 154953 - RNA, 22 nt, synthetic construct
  source 1..22: mol_type = other RNA
tgttttgaacgaatgaaaacac

SEQ ID NO: 154954 - RNA, 22 nt, synthetic construct
  source 1..22: mol_type = other RNA
tgttttgaataacctcataaga

SEQ ID NO: 154955 - RNA, 22 nt, synthetic construct
  source 1..22: mol_type = other RNA
tgttttgatagttgcagattca

SEQ ID NO: 154956 - RNA, 22 nt, synthetic construct
  source 1..22: mol_type = other RNA
tgttttgatttgcatttctcta

SEQ ID NO: 154957 - RNA, 22 nt, synthetic construct
  source 1..22: mol_type = other RNA
tgttttgcaagattaatcttgt

SEQ ID NO: 154958 - RNA, 22 nt, synthetic construct
  source 1..22: mol_type = other RNA
tgttttgcagagatgaggtctc

SEQ ID NO: 154959 - RNA, 22 nt, synthetic construct
  source 1..22: mol_type = other RNA
tgttttgcttactgtagcattg

SEQ ID NO: 154960 - RNA, 22 nt, synthetic construct
  source 1..22: mol_type = other RNA
tgttttgcttcgaagcttatta

SEQ ID NO: 154961 - RNA, 22 nt, synthetic construct
  source 1..22: mol_type = other RNA
tgttttggtaaaatgtggcaaa

SEQ ID NO: 154962 - RNA, 22 nt, synthetic construct
  source 1..22: mol_type = other RNA
tgttttggtcaaaactgtattt

SEQ ID NO: 154963 - RNA, 22 nt, synthetic construct
  source 1..22: mol_type = other RNA
tgttttgtgtttgtgaccagat

SEQ ID NO: 154964 - RNA, 22 nt, synthetic construct
  source 1..22: mol_type = other RNA
tgttttgttctcgttcatgttc

SEQ ID NO: 154965 - RNA, 22 nt, synthetic construct
  source 1..22: mol_type = other RNA
tgttttgttgctattgttgaat

SEQ ID NO: 154966 - RNA, 22 nt, synthetic construct
  source 1..22: mol_type = other RNA
tgttttgttttgaataacctca

SEQ ID NO: 154967 - RNA, 22 nt, synthetic construct
  source 1..22: mol_type = other RNA
tgttttgtttttctctccttgc

SEQ ID NO: 154968 - RNA, 22 nt, synthetic construct
  source 1..22: mol_type = other RNA
tgttttgttttttcacagaaac

SEQ ID NO: 154969 - RNA, 22 nt, synthetic construct
  source 1..22: mol_type = other RNA
tgtttttaattcttaaactgcc

SEQ ID NO: 154970 - RNA, 22 nt, synthetic construct
  source 1..22: mol_type = other RNA
tgtttttagagagatgcctgtg

SEQ ID NO: 154971 - RNA, 22 nt, synthetic construct
  source 1..22: mol_type = other RNA
tgtttttatatgcattaagcca

SEQ ID NO: 154972 - RNA, 22 nt, synthetic construct
  source 1..22: mol_type = other RNA
tgtttttcagccctgatagata

SEQ ID NO: 154973 - RNA, 22 nt, synthetic construct
  source 1..22: mol_type = other RNA
tgtttttccgtctagccacttc

SEQ ID NO: 154974 - RNA, 22 nt, synthetic construct
  source 1..22: mol_type = other RNA
tgtttttctaggtagtttcttt

SEQ ID NO: 154975 - RNA, 22 nt, synthetic construct
  source 1..22: mol_type = other RNA
tgtttttctctccttgcacatt

SEQ ID NO: 154976 - RNA, 22 nt, synthetic construct
  source 1..22: mol_type = other RNA
tgtttttcttagtctagccaag

SEQ ID NO: 154977 - RNA, 22 nt, synthetic construct
  source 1..22: mol_type = other RNA
tgtttttcttttttgagttgga

SEQ ID NO: 154978 - RNA, 22 nt, synthetic construct
  source 1..22: mol_type = other RNA
tgtttttgaaaagaacaacatg

SEQ ID NO: 154979 - RNA, 22 nt, synthetic construct
  source 1..22: mol_type = other RNA
tgttttttcacagaaacagaaa

SEQ ID NO: 154980 - RNA, 22 nt, synthetic construct
  source 1..22: mol_type = other RNA
tgttttttcctcccttcagcct

SEQ ID NO: 154981 - RNA, 22 nt, synthetic construct
  source 1..22: mol_type = other RNA
tgttttttccttctttggggga

SEQ ID NO: 154982 - RNA, 22 nt, synthetic construct
  source 1..22: mol_type = other RNA
tgttttttgttttggtcaaaac

SEQ ID NO: 154983 - RNA, 22 nt, synthetic construct
  source 1..22: mol_type = other RNA
ttaaaaaatgcgcgtccgcgac

SEQ ID NO: 154984 - RNA, 22 nt, synthetic construct
  source 1..22: mol_type = other RNA
ttaaaaacaacactaaccaaca

SEQ ID NO: 154985 - RNA, 22 nt, synthetic construct
  source 1..22: mol_type = other RNA
ttaaaaactgagaccggatgag

SEQ ID NO: 154986 - RNA, 22 nt, synthetic construct
  source 1..22: mol_type = other RNA
ttaaaaacttaagtatctcggt

SEQ ID NO: 154987 - RNA, 22 nt, synthetic construct
  source 1..22: mol_type = other RNA
ttaaaaactttttgggcctttc

SEQ ID NO: 154988 - RNA, 22 nt, synthetic construct
  source 1..22: mol_type = other RNA
ttaaaaagaaaaagctcacctc

SEQ ID NO: 154989 - RNA, 22 nt, synthetic construct
  source 1..22: mol_type = other RNA
ttaaaaagcagctacctgttga

SEQ ID NO: 154990 - RNA, 22 nt, synthetic construct
  source 1..22: mol_type = other RNA
ttaaaaatgacaccaaaactac

SEQ ID NO: 154991 - RNA, 22 nt, synthetic construct
  source 1..22: mol_type = other RNA
ttaaaacactggcaaaaatcat

SEQ ID NO: 154992 - RNA, 22 nt, synthetic construct
  source 1..22: mol_type = other RNA
ttaaaacatggatatttggccg

SEQ ID NO: 154993 - RNA, 22 nt, synthetic construct
  source 1..22: mol_type = other RNA
ttaaaaccagagcggaattttt

SEQ ID NO: 154994 - RNA, 22 nt, synthetic construct
  source 1..22: mol_type = other RNA
ttaaaacccatgatctttggaa

SEQ ID NO: 154995 - RNA, 22 nt, synthetic construct
  source 1..22: mol_type = other RNA
ttaaaactcacaaaaagtgtga

SEQ ID NO: 154996 - RNA, 22 nt, synthetic construct
  source 1..22: mol_type = other RNA
ttaaaactgctgagtcttctac

SEQ ID NO: 154997 - RNA, 22 nt, synthetic construct
  source 1..22: mol_type = other RNA
ttaaaacttgtagaggaggagg

SEQ ID NO: 154998 - RNA, 22 nt, synthetic construct
  source 1..22: mol_type = other RNA
ttaaaactttaggtcagaatac

SEQ ID NO: 154999 - RNA, 22 nt, synthetic construct
  source 1..22: mol_type = other RNA
ttaaaagaaaatggccaagagt

SEQ ID NO: 155000 - RNA, 22 nt, synthetic construct
  source 1..22: mol_type = other RNA
ttaaaagaacctctggaaagga

SEQ ID NO: 155001 - RNA, 22 nt, synthetic construct
  source 1..22: mol_type = other RNA
ttaaaagacatctttcctgtga

SEQ ID NO: 155002 - RNA, 22 nt, synthetic construct
  source 1..22: mol_type = other RNA
ttaaaagagcgaagagggagaa

SEQ ID NO: 155003 - RNA, 22 nt, synthetic construct
  source 1..22: mol_type = other RNA
ttaaaagagtgcacattccttc

SEQ ID NO: 155004 - RNA, 22 nt, synthetic construct
  source 1..22: mol_type = other RNA
ttaaaagatatccacagtatgc

SEQ ID NO: 155005 - RNA, 22 nt, synthetic construct
  source 1..22: mol_type = other RNA
ttaaaagatgcattctgtcaca

SEQ ID NO: 155006 - RNA, 22 nt, synthetic construct
  source 1..22: mol_type = other RNA
ttaaaagcacaagcacagagtc

SEQ ID NO: 155007 - RNA, 22 nt, synthetic construct
  source 1..22: mol_type = other RNA
ttaaaaggagatatacaggaag

SEQ ID NO: 155008 - RNA, 22 nt, synthetic construct
  source 1..22: mol_type = other RNA
ttaaaaggtataaaggatgcac

SEQ ID NO: 155009 - RNA, 22 nt, synthetic construct
  source 1..22: mol_type = other RNA
ttaaaagtaaattcgcataacc

SEQ ID NO: 155010 - RNA, 22 nt, synthetic construct
  source 1..22: mol_type = other RNA
ttaaaagtcagctaggcgtagt

SEQ ID NO: 155011 - RNA, 22 nt, synthetic construct
  source 1..22: mol_type = other RNA
ttaaaagtgctgcagtatgcat

SEQ ID NO: 155012 - RNA, 22 nt, synthetic construct
  source 1..22: mol_type = other RNA
ttaaaagttagctggcaaaatg

SEQ ID NO: 155013 - RNA, 22 nt, synthetic construct
  source 1..22: mol_type = other RNA
ttaaaagttttccaaccactga

SEQ ID NO: 155014 - RNA, 22 nt, synthetic construct
  source 1..22: mol_type = other RNA
ttaaaataacacgcagaaccac

SEQ ID NO: 155015 - RNA, 22 nt, synthetic construct
  source 1..22: mol_type = other RNA
ttaaaataccagaggttaaagc

SEQ ID NO: 155016 - RNA, 22 nt, synthetic construct
  source 1..22: mol_type = other RNA
ttaaaatctgattcagtggttg

SEQ ID NO: 155017 - RNA, 22 nt, synthetic construct
  source 1..22: mol_type = other RNA
ttaaaatgaaaatgttccctct

SEQ ID NO: 155018 - RNA, 22 nt, synthetic construct
  source 1..22: mol_type = other RNA
ttaaaatgaacctgctttctac

SEQ ID NO: 155019 - RNA, 22 nt, synthetic construct
  source 1..22: mol_type = other RNA
ttaaaatgatagcattatccca

SEQ ID NO: 155020 - RNA, 22 nt, synthetic construct
  source 1..22: mol_type = other RNA
ttaaaattcttccagcctggta

SEQ ID NO: 155021 - RNA, 22 nt, synthetic construct
  source 1..22: mol_type = other RNA
ttaaaattgcagagtgttcaaa

SEQ ID NO: 155022 - RNA, 22 nt, synthetic construct
  source 1..22: mol_type = other RNA
ttaaacaatcttgaaaggggcc

SEQ ID NO: 155023 - RNA, 22 nt, synthetic construct
  source 1..22: mol_type = other RNA
ttaaacacacccttggtaaaca

SEQ ID NO: 155024 - RNA, 22 nt, synthetic construct
  source 1..22: mol_type = other RNA
ttaaacaggtgtaagagattaa

SEQ ID NO: 155025 - RNA, 22 nt, synthetic construct
  source 1..22: mol_type = other RNA
ttaaacatgtaaaacagaccct

SEQ ID NO: 155026 - RNA, 22 nt, synthetic construct
  source 1..22: mol_type = other RNA
ttaaacccaacaaacaattagc

SEQ ID NO: 155027 - RNA, 22 nt, synthetic construct
  source 1..22: mol_type = other RNA
ttaaacccatttcatgccatcc

SEQ ID NO: 155028 - RNA, 22 nt, synthetic construct
  source 1..22: mol_type = other RNA
ttaaacctgttacatggttctg

SEQ ID NO: 155029 - RNA, 22 nt, synthetic construct
  source 1..22: mol_type = other RNA
ttaaacgtcagagcagcactga

SEQ ID NO: 155030 - RNA, 22 nt, synthetic construct
  source 1..22: mol_type = other RNA
ttaaactatagacccaaagcaa

SEQ ID NO: 155031 - RNA, 22 nt, synthetic construct
  source 1..22: mol_type = other RNA
ttaaactcattatcccagacag

SEQ ID NO: 155032 - RNA, 22 nt, synthetic construct
  source 1..22: mol_type = other RNA
ttaaactgccaaaccctacacc

SEQ ID NO: 155033 - RNA, 22 nt, synthetic construct
  source 1..22: mol_type = other RNA
ttaaactggatgaatacaaagg

SEQ ID NO: 155034 - RNA, 22 nt, synthetic construct
  source 1..22: mol_type = other RNA
ttaaacttcaaggtaatctagt

SEQ ID NO: 155035 - RNA, 22 nt, synthetic construct
  source 1..22: mol_type = other RNA
ttaaacttggtctgggtgatat

SEQ ID NO: 155036 - RNA, 22 nt, synthetic construct
  source 1..22: mol_type = other RNA
ttaaagaaaggtctctctctgt

SEQ ID NO: 155037 - RNA, 22 nt, synthetic construct
  source 1..22: mol_type = other RNA
ttaaagaaattagaacatctgg

SEQ ID NO: 155038 - RNA, 22 nt, synthetic construct
  source 1..22: mol_type = other RNA
ttaaagacagctactaaacaaa

SEQ ID NO: 155039 - RNA, 22 nt, synthetic construct
  source 1..22: mol_type = other RNA
ttaaagacctcaggtttagaat

SEQ ID NO: 155040 - RNA, 22 nt, synthetic construct
  source 1..22: mol_type = other RNA
ttaaagacgttcagataacaaa

SEQ ID NO: 155041 - RNA, 22 nt, synthetic construct
  source 1..22: mol_type = other RNA
ttaaagcaacaggaagaggcag

SEQ ID NO: 155042 - RNA, 22 nt, synthetic construct
  source 1..22: mol_type = other RNA
ttaaagcagggaggggtcccca

SEQ ID NO: 155043 - RNA, 22 nt, synthetic construct
  source 1..22: mol_type = other RNA
ttaaagccacactcttggtctt

SEQ ID NO: 155044 - RNA, 22 nt, synthetic construct
  source 1..22: mol_type = other RNA
ttaaagcctctcaacacttcag

SEQ ID NO: 155045 - RNA, 22 nt, synthetic construct
  source 1..22: mol_type = other RNA
ttaaagcgctactcagctgtca

SEQ ID NO: 155046 - RNA, 22 nt, synthetic construct
  source 1..22: mol_type = other RNA
ttaaagctctaataaaagctgg

SEQ ID NO: 155047 - RNA, 22 nt, synthetic construct
  source 1..22: mol_type = other RNA
ttaaagctctatggcatttgag

SEQ ID NO: 155048 - RNA, 22 nt, synthetic construct
  source 1..22: mol_type = other RNA
ttaaagctgaactcctttctta

SEQ ID NO: 155049 - RNA, 22 nt, synthetic construct
  source 1..22: mol_type = other RNA
ttaaagctttgtgactgtgagg

SEQ ID NO: 155050 - RNA, 22 nt, synthetic construct
  source 1..22: mol_type = other RNA
ttaaaggaaaagagatctagtg

SEQ ID NO: 155051 - RNA, 22 nt, synthetic construct
  source 1..22: mol_type = other RNA
ttaaaggatgtcaactgaggca

SEQ ID NO: 155052 - RNA, 22 nt, synthetic construct
  source 1..22: mol_type = other RNA
ttaaaggccctgatttaaagta

SEQ ID NO: 155053 - RNA, 22 nt, synthetic construct
  source 1..22: mol_type = other RNA
ttaaaggctggaaataatttcc

SEQ ID NO: 155054 - RNA, 22 nt, synthetic construct
  source 1..22: mol_type = other RNA
ttaaagggataatgctatccag

SEQ ID NO: 155055 - RNA, 22 nt, synthetic construct
  source 1..22: mol_type = other RNA
ttaaaggtttggagtttgtagc

SEQ ID NO: 155056 - RNA, 22 nt, synthetic construct
  source 1..22: mol_type = other RNA
ttaaagtagaaggccctatgcc

SEQ ID NO: 155057 - RNA, 22 nt, synthetic construct
  source 1..22: mol_type = other RNA
ttaaagtaggttgagacttaga

SEQ ID NO: 155058 - RNA, 22 nt, synthetic construct
  source 1..22: mol_type = other RNA
ttaaagtgtaaagtttctctct

SEQ ID NO: 155059 - RNA, 22 nt, synthetic construct
  source 1..22: mol_type = other RNA
ttaaagttagtgaagcagagag

SEQ ID NO: 155060 - RNA, 22 nt, synthetic construct
  source 1..22: mol_type = other RNA
ttaaagttggtcctgcatatgt

SEQ ID NO: 155061 - RNA, 22 nt, synthetic construct
  source 1..22: mol_type = other RNA
ttaaagtttcaaactgtggtca

SEQ ID NO: 155062 - RNA, 22 nt, synthetic construct
  source 1..22: mol_type = other RNA
ttaaataagggcattttcaagg

SEQ ID NO: 155063 - RNA, 22 nt, synthetic construct
  source 1..22: mol_type = other RNA
ttaaatacagagcacagactca

SEQ ID NO: 155064 - RNA, 22 nt, synthetic construct
  source 1..22: mol_type = other RNA
ttaaataccacctgaaatctga

SEQ ID NO: 155065 - RNA, 22 nt, synthetic construct
  source 1..22: mol_type = other RNA
ttaaatcagcaccatctaacag

SEQ ID NO: 155066 - RNA, 22 nt, synthetic construct
  source 1..22: mol_type = other RNA
ttaaatcagggcctttaatcac

SEQ ID NO: 155067 - RNA, 22 nt, synthetic construct
  source 1..22: mol_type = other RNA
ttaaatcatgatgtttggctcc

SEQ ID NO: 155068 - RNA, 22 nt, synthetic construct
  source 1..22: mol_type = other RNA
ttaaatccgagacaagttctcc

SEQ ID NO: 155069 - RNA, 22 nt, synthetic construct
  source 1..22: mol_type = other RNA
ttaaatgaaggaaaaaacgggt

SEQ ID NO: 155070 - RNA, 22 nt, synthetic construct
  source 1..22: mol_type = other RNA
ttaaatgagacacctacaatat

SEQ ID NO: 155071 - RNA, 22 nt, synthetic construct
  source 1..22: mol_type = other RNA
ttaaatgccaatttgggatata

SEQ ID NO: 155072 - RNA, 22 nt, synthetic construct
  source 1..22: mol_type = other RNA
ttaaatgccacataaatcacag

SEQ ID NO: 155073 - RNA, 22 nt, synthetic construct
  source 1..22: mol_type = other RNA
ttaaatgtacaacattcatccc

SEQ ID NO: 155074 - RNA, 22 nt, synthetic construct
  source 1..22: mol_type = other RNA
ttaaatgtgaattagatggctt

SEQ ID NO: 155075 - RNA, 22 nt, synthetic construct
  source 1..22: mol_type = other RNA
ttaaatgttttgcagagatgag

SEQ ID NO: 155076 - RNA, 22 nt, synthetic construct
  source 1..22: mol_type = other RNA
ttaaattaaaaactgagaccgg

SEQ ID NO: 155077 - RNA, 22 nt, synthetic construct
  source 1..22: mol_type = other RNA
ttaaatttcattaggttgatgg

SEQ ID NO: 155078 - RNA, 22 nt, synthetic construct
  source 1..22: mol_type = other RNA
ttaaatttctaaggttctgcta

SEQ ID NO: 155079 - RNA, 22 nt, synthetic construct
  source 1..22: mol_type = other RNA
ttaaatttgattgttagccaca

SEQ ID NO: 155080 - RNA, 22 nt, synthetic construct
  source 1..22: mol_type = other RNA
ttaaattttgagacctcaggca

SEQ ID NO: 155081 - RNA, 22 nt, synthetic construct
  source 1..22: mol_type = other RNA
ttaacaagaatcctgctatttt

SEQ ID NO: 155082 - RNA, 22 nt, synthetic construct
  source 1..22: mol_type = other RNA
ttaacaatactgcattgtgcac

SEQ ID NO: 155083 - RNA, 22 nt, synthetic construct
  source 1..22: mol_type = other RNA
ttaacaattggtgaatctgagt

SEQ ID NO: 155084 - RNA, 22 nt, synthetic construct
  source 1..22: mol_type = other RNA
ttaacacacaacaatgaattct

SEQ ID NO: 155085 - RNA, 22 nt, synthetic construct
  source 1..22: mol_type = other RNA
ttaacaccatggcaggtttcaa

SEQ ID NO: 155086 - RNA, 22 nt, synthetic construct
  source 1..22: mol_type = other RNA
ttaacacctttgtattcatcca

SEQ ID NO: 155087 - RNA, 22 nt, synthetic construct
  source 1..22: mol_type = other RNA
ttaacactaatccttctcatag

SEQ ID NO: 155088 - RNA, 22 nt, synthetic construct
  source 1..22: mol_type = other RNA
ttaacagaagggtatatacaat

SEQ ID NO: 155089 - RNA, 22 nt, synthetic construct
  source 1..22: mol_type = other RNA
ttaacagatggtccttttttac

SEQ ID NO: 155090 - RNA, 22 nt, synthetic construct
  source 1..22: mol_type = other RNA
ttaacagctcagaagctatagc

SEQ ID NO: 155091 - RNA, 22 nt, synthetic construct
  source 1..22: mol_type = other RNA
ttaacagtgctgtgccagtgca

SEQ ID NO: 155092 - RNA, 22 nt, synthetic construct
  source 1..22: mol_type = other RNA
ttaacataccgacggctcaggc

SEQ ID NO: 155093 - RNA, 22 nt, synthetic construct
  source 1..22: mol_type = other RNA
ttaacattgatacaatacttgg

SEQ ID NO: 155094 - RNA, 22 nt, synthetic construct
  source 1..22: mol_type = other RNA
ttaacatttcttctagtcacat

SEQ ID NO: 155095 - RNA, 22 nt, synthetic construct
  source 1..22: mol_type = other RNA
ttaacatttgaactcactggcc

SEQ ID NO: 155096 - RNA, 22 nt, synthetic construct
  source 1..22: mol_type = other RNA
ttaaccaagaacaaccttatct

SEQ ID NO: 155097 - RNA, 22 nt, synthetic construct
  source 1..22: mol_type = other RNA
ttaaccaattatgctgagtgaa

SEQ ID NO: 155098 - RNA, 22 nt, synthetic construct
  source 1..22: mol_type = other RNA
ttaaccactgaaacttttcttt

SEQ ID NO: 155099 - RNA, 22 nt, synthetic construct
  source 1..22: mol_type = other RNA
ttaaccatatggtttacaatgg

SEQ ID NO: 155100 - RNA, 22 nt, synthetic construct
  source 1..22: mol_type = other RNA
ttaaccattgagccaaagaaga

SEQ ID NO: 155101 - RNA, 22 nt, synthetic construct
  source 1..22: mol_type = other RNA
ttaacccacagataatttcttc

SEQ ID NO: 155102 - RNA, 22 nt, synthetic construct
  source 1..22: mol_type = other RNA
ttaacctctggtattttaagat

SEQ ID NO: 155103 - RNA, 22 nt, synthetic construct
  source 1..22: mol_type = other RNA
ttaacctcttgaagtcagttac

SEQ ID NO: 155104 - RNA, 22 nt, synthetic construct
  source 1..22: mol_type = other RNA
ttaaccttctggggttcaaacc

SEQ ID NO: 155105 - RNA, 22 nt, synthetic construct
  source 1..22: mol_type = other RNA
ttaacgaattctttaaaactgc

SEQ ID NO: 155106 - RNA, 22 nt, synthetic construct
  source 1..22: mol_type = other RNA
ttaacgtatctgggaaaaaata

SEQ ID NO: 155107 - RNA, 22 nt, synthetic construct
  source 1..22: mol_type = other RNA
ttaacgtttatctacagaggat

SEQ ID NO: 155108 - RNA, 22 nt, synthetic construct
  source 1..22: mol_type = other RNA
ttaactaatagccagtgcagca

SEQ ID NO: 155109 - RNA, 22 nt, synthetic construct
  source 1..22: mol_type = other RNA
ttaactagaattgactttaccc

SEQ ID NO: 155110 - RNA, 22 nt, synthetic construct
  source 1..22: mol_type = other RNA
ttaactataggagttcattcgt

SEQ ID NO: 155111 - RNA, 22 nt, synthetic construct
  source 1..22: mol_type = other RNA
ttaactatcctatgtggggaat

SEQ ID NO: 155112 - RNA, 22 nt, synthetic construct
  source 1..22: mol_type = other RNA
ttaactatggacatgaggaaag

SEQ ID NO: 155113 - RNA, 22 nt, synthetic construct
  source 1..22: mol_type = other RNA
ttaactcatttaaacgtcagag

SEQ ID NO: 155114 - RNA, 22 nt, synthetic construct
  source 1..22: mol_type = other RNA
ttaactccaggggacatgctct

SEQ ID NO: 155115 - RNA, 22 nt, synthetic construct
  source 1..22: mol_type = other RNA
ttaactcttgcattagagcccc

SEQ ID NO: 155116 - RNA, 22 nt, synthetic construct
  source 1..22: mol_type = other RNA
ttaactgaaatcgggagtaaca

SEQ ID NO: 155117 - RNA, 22 nt, synthetic construct
  source 1..22: mol_type = other RNA
ttaactgacttacagaccttat

SEQ ID NO: 155118 - RNA, 22 nt, synthetic construct
  source 1..22: mol_type = other RNA
ttaactgaggtgtttttcagcc

SEQ ID NO: 155119 - RNA, 22 nt, synthetic construct
  source 1..22: mol_type = other RNA
ttaactgtattgcaaactaagt

SEQ ID NO: 155120 - RNA, 22 nt, synthetic construct
  source 1..22: mol_type = other RNA
ttaacttattggaaaactctgt

SEQ ID NO: 155121 - RNA, 22 nt, synthetic construct
  source 1..22: mol_type = other RNA
ttaacttcacctctacacaaaa

SEQ ID NO: 155122 - RNA, 22 nt, synthetic construct
  source 1..22: mol_type = other RNA
ttaacttctaatgcccattaaa

SEQ ID NO: 155123 - RNA, 22 nt, synthetic construct
  source 1..22: mol_type = other RNA
ttaacttgctttgaatttggaa

SEQ ID NO: 155124 - RNA, 22 nt, synthetic construct
  source 1..22: mol_type = other RNA
ttaactttaaagctctatggca

SEQ ID NO: 155125 - RNA, 22 nt, synthetic construct
  source 1..22: mol_type = other RNA
ttaactttgaaatcagaacttg

SEQ ID NO: 155126 - RNA, 22 nt, synthetic construct
  source 1..22: mol_type = other RNA
ttaactttgatgaattccagtt

SEQ ID NO: 155127 - RNA, 22 nt, synthetic construct
  source 1..22: mol_type = other RNA
ttaagaaaagaagttacggttc

SEQ ID NO: 155128 - RNA, 22 nt, synthetic construct
  source 1..22: mol_type = other RNA
ttaagaaaatcattgttcaggg

SEQ ID NO: 155129 - RNA, 22 nt, synthetic construct
  source 1..22: mol_type = other RNA
ttaagaaccatacagtgccttc

SEQ ID NO: 155130 - RNA, 22 nt, synthetic construct
  source 1..22: mol_type = other RNA
ttaagaacttcttcaaaagaca

SEQ ID NO: 155131 - RNA, 22 nt, synthetic construct
  source 1..22: mol_type = other RNA
ttaagaaggaaaagaacacagt

SEQ ID NO: 155132 - RNA, 22 nt, synthetic construct
  source 1..22: mol_type = other RNA
ttaagaagggaacactaagaag

SEQ ID NO: 155133 - RNA, 22 nt, synthetic construct
  source 1..22: mol_type = other RNA
ttaagacaatgtggagttggtg

SEQ ID NO: 155134 - RNA, 22 nt, synthetic construct
  source 1..22: mol_type = other RNA
ttaagacacaaggaaggtcaaa

SEQ ID NO: 155135 - RNA, 22 nt, synthetic construct
  source 1..22: mol_type = other RNA
ttaagacatttgggaatgtggt

SEQ ID NO: 155136 - RNA, 22 nt, synthetic construct
  source 1..22: mol_type = other RNA
ttaagaccacaaggattaatct

SEQ ID NO: 155137 - RNA, 22 nt, synthetic construct
  source 1..22: mol_type = other RNA
ttaagactgctgtttaccaagg

SEQ ID NO: 155138 - RNA, 22 nt, synthetic construct
  source 1..22: mol_type = other RNA
ttaagagaatggaaacttgcca

SEQ ID NO: 155139 - RNA, 22 nt, synthetic construct
  source 1..22: mol_type = other RNA
ttaagagactctcaagaaggta

SEQ ID NO: 155140 - RNA, 22 nt, synthetic construct
  source 1..22: mol_type = other RNA
ttaagagaggaagtgaccctga

SEQ ID NO: 155141 - RNA, 22 nt, synthetic construct
  source 1..22: mol_type = other RNA
ttaagagcatgttgggccaact

SEQ ID NO: 155142 - RNA, 22 nt, synthetic construct
  source 1..22: mol_type = other RNA
ttaagagctaagactataaaac

SEQ ID NO: 155143 - RNA, 22 nt, synthetic construct
  source 1..22: mol_type = other RNA
ttaagagtatctttttcagcag

SEQ ID NO: 155144 - RNA, 22 nt, synthetic construct
  source 1..22: mol_type = other RNA
ttaagagtctcatctgtcaaaa

SEQ ID NO: 155145 - RNA, 22 nt, synthetic construct
  source 1..22: mol_type = other RNA
ttaagagtgaagaaacctttct

SEQ ID NO: 155146 - RNA, 22 nt, synthetic construct
  source 1..22: mol_type = other RNA
ttaagagtgtgctgactagtac

SEQ ID NO: 155147 - RNA, 22 nt, synthetic construct
  source 1..22: mol_type = other RNA
ttaagataatgctgttctctgt

SEQ ID NO: 155148 - RNA, 22 nt, synthetic construct
  source 1..22: mol_type = other RNA
ttaagatggatttttctgtttc

SEQ ID NO: 155149 - RNA, 22 nt, synthetic construct
  source 1..22: mol_type = other RNA
ttaagattcaacaaaactgggg

SEQ ID NO: 155150 - RNA, 22 nt, synthetic construct
  source 1..22: mol_type = other RNA
ttaagattctctttagggaaga

SEQ ID NO: 155151 - RNA, 22 nt, synthetic construct
  source 1..22: mol_type = other RNA
ttaagcaaaatggaagtgctgg

SEQ ID NO: 155152 - RNA, 22 nt, synthetic construct
  source 1..22: mol_type = other RNA
ttaagcaaccttttaggtgccc

SEQ ID NO: 155153 - RNA, 22 nt, synthetic construct
  source 1..22: mol_type = other RNA
ttaagcacagaattactatatg

SEQ ID NO: 155154 - RNA, 22 nt, synthetic construct
  source 1..22: mol_type = other RNA
ttaagcacagactgtgccttga

SEQ ID NO: 155155 - RNA, 22 nt, synthetic construct
  source 1..22: mol_type = other RNA
ttaagcacatctgtcttgtgca

SEQ ID NO: 155156 - RNA, 22 nt, synthetic construct
  source 1..22: mol_type = other RNA
ttaagcaccactagagtattac

SEQ ID NO: 155157 - RNA, 22 nt, synthetic construct
  source 1..22: mol_type = other RNA
ttaagcatagtttgagtatttc

SEQ ID NO: 155158 - RNA, 22 nt, synthetic construct
  source 1..22: mol_type = other RNA
ttaagcatcccatatggaggca

SEQ ID NO: 155159 - RNA, 22 nt, synthetic construct
  source 1..22: mol_type = other RNA
ttaagcattttccggttgtata

SEQ ID NO: 155160 - RNA, 22 nt, synthetic construct
  source 1..22: mol_type = other RNA
ttaagccagtcactaaaaatca

SEQ ID NO: 155161 - RNA, 22 nt, synthetic construct
  source 1..22: mol_type = other RNA
ttaagccatttcaggttttcga

SEQ ID NO: 155162 - RNA, 22 nt, synthetic construct
  source 1..22: mol_type = other RNA
ttaagcccaacttcacaccatt

SEQ ID NO: 155163 - RNA, 22 nt, synthetic construct
  source 1..22: mol_type = other RNA
ttaagccgttccatcagagagg

SEQ ID NO: 155164 - RNA, 22 nt, synthetic construct
  source 1..22: mol_type = other RNA
ttaagcctagagattaggcaga

SEQ ID NO: 155165 - RNA, 22 nt, synthetic construct
  source 1..22: mol_type = other RNA
ttaagcttaggtctttgatcca

SEQ ID NO: 155166 - RNA, 22 nt, synthetic construct
  source 1..22: mol_type = other RNA
ttaagcttcgacagtcccttgc

SEQ ID NO: 155167 - RNA, 22 nt, synthetic construct
  source 1..22: mol_type = other RNA
ttaaggaaatggacagcacatt

SEQ ID NO: 155168 - RNA, 22 nt, synthetic construct
  source 1..22: mol_type = other RNA
ttaaggaatgcctataaaatgc

SEQ ID NO: 155169 - RNA, 22 nt, synthetic construct
  source 1..22: mol_type = other RNA
ttaaggacatccacaacattgt

SEQ ID NO: 155170 - RNA, 22 nt, synthetic construct
  source 1..22: mol_type = other RNA
ttaaggaccaggtatggcgact

SEQ ID NO: 155171 - RNA, 22 nt, synthetic construct
  source 1..22: mol_type = other RNA
ttaaggagatggcacataccat

SEQ ID NO: 155172 - RNA, 22 nt, synthetic construct
  source 1..22: mol_type = other RNA
ttaaggcagggcttggtggccc

SEQ ID NO: 155173 - RNA, 22 nt, synthetic construct
  source 1..22: mol_type = other RNA
ttaaggcgcagacacaccatga

SEQ ID NO: 155174 - RNA, 22 nt, synthetic construct
  source 1..22: mol_type = other RNA
ttaaggctaaaacatacatgag

SEQ ID NO: 155175 - RNA, 22 nt, synthetic construct
  source 1..22: mol_type = other RNA
ttaaggctgaacaatattccat

SEQ ID NO: 155176 - RNA, 22 nt, synthetic construct
  source 1..22: mol_type = other RNA
ttaaggctggaggatggcttga

SEQ ID NO: 155177 - RNA, 22 nt, synthetic construct
  source 1..22: mol_type = other RNA
ttaaggcttggaaaacaaattg

SEQ ID NO: 155178 - RNA, 22 nt, synthetic construct
  source 1..22: mol_type = other RNA
ttaagggaaacactcataccag

SEQ ID NO: 155179 - RNA, 22 nt, synthetic construct
  source 1..22: mol_type = other RNA
ttaagggaaacagggttacagt

SEQ ID NO: 155180 - RNA, 22 nt, synthetic construct
  source 1..22: mol_type = other RNA
ttaagggaagagctaagatgct

SEQ ID NO: 155181 - RNA, 22 nt, synthetic construct
  source 1..22: mol_type = other RNA
ttaagggccatttcatttctgt

SEQ ID NO: 155182 - RNA, 22 nt, synthetic construct
  source 1..22: mol_type = other RNA
ttaaggggtaaatggtttctcc

SEQ ID NO: 155183 - RNA, 22 nt, synthetic construct
  source 1..22: mol_type = other RNA
ttaaggtaagggtccagcttca

SEQ ID NO: 155184 - RNA, 22 nt, synthetic construct
  source 1..22: mol_type = other RNA
ttaaggtttagaaaacatatcc

SEQ ID NO: 155185 - RNA, 22 nt, synthetic construct
  source 1..22: mol_type = other RNA
ttaagtatctcggtcattctgg

SEQ ID NO: 155186 - RNA, 22 nt, synthetic construct
  source 1..22: mol_type = other RNA
ttaagtattgcattgaatctgt

SEQ ID NO: 155187 - RNA, 22 nt, synthetic construct
  source 1..22: mol_type = other RNA
ttaagtcactccatttgtggca

SEQ ID NO: 155188 - RNA, 22 nt, synthetic construct
  source 1..22: mol_type = other RNA
ttaagtctgaaagcttctgagc

SEQ ID NO: 155189 - RNA, 22 nt, synthetic construct
  source 1..22: mol_type = other RNA
ttaagtgcacaatgcagtattg

SEQ ID NO: 155190 - RNA, 22 nt, synthetic construct
  source 1..22: mol_type = other RNA
ttaagtggcgctgtttgcctgc

SEQ ID NO: 155191 - RNA, 22 nt, synthetic construct
  source 1..22: mol_type = other RNA
ttaagtgtacaattcggtggca

SEQ ID NO: 155192 - RNA, 22 nt, synthetic construct
  source 1..22: mol_type = other RNA
ttaagtgttcttaccacaaaaa

SEQ ID NO: 155193 - RNA, 22 nt, synthetic construct
  source 1..22: mol_type = other RNA
ttaagtgtttgaaaagtgtttg

SEQ ID NO: 155194 - RNA, 22 nt, synthetic construct
  source 1..22: mol_type = other RNA
ttaagttaaaacttgtagagga

SEQ ID NO: 155195 - RNA, 22 nt, synthetic construct
  source 1..22: mol_type = other RNA
ttaagttactgattagaaggat

SEQ ID NO: 155196 - RNA, 22 nt, synthetic construct
  source 1..22: mol_type = other RNA
ttaagttctccaagttattaca

SEQ ID NO: 155197 - RNA, 22 nt, synthetic construct
  source 1..22: mol_type = other RNA
ttaataaccctgttttgtagat

SEQ ID NO: 155198 - RNA, 22 nt, synthetic construct
  source 1..22: mol_type = other RNA
ttaataacctcaaagtggaaac

SEQ ID NO: 155199 - RNA, 22 nt, synthetic construct
  source 1..22: mol_type = other RNA
ttaataactgcctaagtaatgc

SEQ ID NO: 155200 - RNA, 22 nt, synthetic construct
  source 1..22: mol_type = other RNA
ttaataagatcatacacctgga

SEQ ID NO: 155201 - RNA, 22 nt, synthetic construct
  source 1..22: mol_type = other RNA
ttaataagcttcgaagcaaaac

SEQ ID NO: 155202 - RNA, 22 nt, synthetic construct
  source 1..22: mol_type = other RNA
ttaatactatgtatgtggctca

SEQ ID NO: 155203 - RNA, 22 nt, synthetic construct
  source 1..22: mol_type = other RNA
ttaatacttgtgtagcgggaaa

SEQ ID NO: 155204 - RNA, 22 nt, synthetic construct
  source 1..22: mol_type = other RNA
ttaatagaggtctgtctttcag

SEQ ID NO: 155205 - RNA, 22 nt, synthetic construct
  source 1..22: mol_type = other RNA
ttaatagataggtcatgtacat

SEQ ID NO: 155206 - RNA, 22 nt, synthetic construct
  source 1..22: mol_type = other RNA
ttaatagcccaacagggttttg

SEQ ID NO: 155207 - RNA, 22 nt, synthetic construct
  source 1..22: mol_type = other RNA
ttaatagcctcctaagttttgg

SEQ ID NO: 155208 - RNA, 22 nt, synthetic construct
  source 1..22: mol_type = other RNA
ttaatagtgaccctttgaagta

SEQ ID NO: 155209 - RNA, 22 nt, synthetic construct
  source 1..22: mol_type = other RNA
ttaatataaaaattccgctctg

SEQ ID NO: 155210 - RNA, 22 nt, synthetic construct
  source 1..22: mol_type = other RNA
ttaatatgtgtacaatggggct

SEQ ID NO: 155211 - RNA, 22 nt, synthetic construct
  source 1..22: mol_type = other RNA
ttaatattataagttgggagtc

SEQ ID NO: 155212 - RNA, 22 nt, synthetic construct
  source 1..22: mol_type = other RNA
ttaatattgaaacgatgcattc

SEQ ID NO: 155213 - RNA, 22 nt, synthetic construct
  source 1..22: mol_type = other RNA
ttaatattgtaggtgtctcatt

SEQ ID NO: 155214 - RNA, 22 nt, synthetic construct
  source 1..22: mol_type = other RNA
ttaatcaccaggcgcggtggct

SEQ ID NO: 155215 - RNA, 22 nt, synthetic construct
  source 1..22: mol_type = other RNA
ttaatcacctcaagtgatgcaa

SEQ ID NO: 155216 - RNA, 22 nt, synthetic construct
  source 1..22: mol_type = other RNA
ttaatcagtctgtaagcacctg

SEQ ID NO: 155217 - RNA, 22 nt, synthetic construct
  source 1..22: mol_type = other RNA
ttaatccttgtggtcttaagag

SEQ ID NO: 155218 - RNA, 22 nt, synthetic construct
  source 1..22: mol_type = other RNA
ttaatcgaatcctcacaacagg

SEQ ID NO: 155219 - RNA, 22 nt, synthetic construct
  source 1..22: mol_type = other RNA
ttaatctacaaaacagggttat

SEQ ID NO: 155220 - RNA, 22 nt, synthetic construct
  source 1..22: mol_type = other RNA
ttaatctcatccacaatgagac

SEQ ID NO: 155221 - RNA, 22 nt, synthetic construct
  source 1..22: mol_type = other RNA
ttaatctcctgagtagcaggga

SEQ ID NO: 155222 - RNA, 22 nt, synthetic construct
  source 1..22: mol_type = other RNA
ttaatctctcttgaccttagtt

SEQ ID NO: 155223 - RNA, 22 nt, synthetic construct
  source 1..22: mol_type = other RNA
ttaatctcttacacctgtttaa

SEQ ID NO: 155224 - RNA, 22 nt, synthetic construct
  source 1..22: mol_type = other RNA
ttaatctgattttaatctgtcc

SEQ ID NO: 155225 - RNA, 22 nt, synthetic construct
  source 1..22: mol_type = other RNA
ttaatctgatttttagtgactg

SEQ ID NO: 155226 - RNA, 22 nt, synthetic construct
  source 1..22: mol_type = other RNA
ttaatctgtcagcagttcagcc

SEQ ID NO: 155227 - RNA, 22 nt, synthetic construct
  source 1..22: mol_type = other RNA
ttaatctgtcctgaatactatt

SEQ ID NO: 155228 - RNA, 22 nt, synthetic construct
  source 1..22: mol_type = other RNA
ttaatcttcacacttagttcaa

SEQ ID NO: 155229 - RNA, 22 nt, synthetic construct
  source 1..22: mol_type = other RNA
ttaatcttgcaaaacaatagcc

SEQ ID NO: 155230 - RNA, 22 nt, synthetic construct
  source 1..22: mol_type = other RNA
ttaatctttctgaactcaaaag

SEQ ID NO: 155231 - RNA, 22 nt, synthetic construct
  source 1..22: mol_type = other RNA
ttaatgagtagtacttctgagt

SEQ ID NO: 155232 - RNA, 22 nt, synthetic construct
  source 1..22: mol_type = other RNA
ttaatgcaacctgctttcctca

SEQ ID NO: 155233 - RNA, 22 nt, synthetic construct
  source 1..22: mol_type = other RNA
ttaatgcccaatcaaatccagt

SEQ ID NO: 155234 - RNA, 22 nt, synthetic construct
  source 1..22: mol_type = other RNA
ttaatgccccatgtgttggcac

SEQ ID NO: 155235 - RNA, 22 nt, synthetic construct
  source 1..22: mol_type = other RNA
ttaatgcttcatattttgtggg

SEQ ID NO: 155236 - RNA, 22 nt, synthetic construct
  source 1..22: mol_type = other RNA
ttaatgggcacttgggatgttt

SEQ ID NO: 155237 - RNA, 22 nt, synthetic construct
  source 1..22: mol_type = other RNA
ttaatgggcattagaagttaaa

SEQ ID NO: 155238 - RNA, 22 nt, synthetic construct
  source 1..22: mol_type = other RNA
ttaatggttagactgcacataa

SEQ ID NO: 155239 - RNA, 22 nt, synthetic construct
  source 1..22: mol_type = other RNA
ttaatgtagatcctgaggaagc

SEQ ID NO: 155240 - RNA, 22 nt, synthetic construct
  source 1..22: mol_type = other RNA
ttaatgtaggtgtctgatgtgt

SEQ ID NO: 155241 - RNA, 22 nt, synthetic construct
  source 1..22: mol_type = other RNA
ttaatgtgatatgccacatttt

SEQ ID NO: 155242 - RNA, 22 nt, synthetic construct
  source 1..22: mol_type = other RNA
ttaatgtgctgtccatttcctt

SEQ ID NO: 155243 - RNA, 22 nt, synthetic construct
  source 1..22: mol_type = other RNA
ttaatgtgtgaagaaggaatgt

SEQ ID NO: 155244 - RNA, 22 nt, synthetic construct
  source 1..22: mol_type = other RNA
ttaatgtgttgtctgattcagt

SEQ ID NO: 155245 - RNA, 22 nt, synthetic construct
  source 1..22: mol_type = other RNA
ttaatgttgacatcttgcataa

SEQ ID NO: 155246 - RNA, 22 nt, synthetic construct
  source 1..22: mol_type = other RNA
ttaatgtttagtagaattctcc

SEQ ID NO: 155247 - RNA, 22 nt, synthetic construct
  source 1..22: mol_type = other RNA
ttaatgttttatttagcccatg

SEQ ID NO: 155248 - RNA, 22 nt, synthetic construct
  source 1..22: mol_type = other RNA
ttaattacccaggcatgatggc

SEQ ID NO: 155249 - RNA, 22 nt, synthetic construct
  source 1..22: mol_type = other RNA
ttaattagccgggtgtagtggt

SEQ ID NO: 155250 - RNA, 22 nt, synthetic construct
  source 1..22: mol_type = other RNA
ttaattatgagcattccccaca

SEQ ID NO: 155251 - RNA, 22 nt, synthetic construct
  source 1..22: mol_type = other RNA
ttaattatttgtgcatactgtg

SEQ ID NO: 155252 - RNA, 22 nt, synthetic construct
  source 1..22: mol_type = other RNA
ttaattcagtcaacaccaagca

SEQ ID NO: 155253 - RNA, 22 nt, synthetic construct
  source 1..22: mol_type = other RNA
ttaattccaaattagctttctc

SEQ ID NO: 155254 - RNA, 22 nt, synthetic construct
  source 1..22: mol_type = other RNA
ttaattccacaaccactgggga

SEQ ID NO: 155255 - RNA, 22 nt, synthetic construct
  source 1..22: mol_type = other RNA
ttaattcctactttcttcaacc

SEQ ID NO: 155256 - RNA, 22 nt, synthetic construct
  source 1..22: mol_type = other RNA
ttaattctatctgaactttcga

SEQ ID NO: 155257 - RNA, 22 nt, synthetic construct
  source 1..22: mol_type = other RNA
ttaattctgaggcctcctgcct

SEQ ID NO: 155258 - RNA, 22 nt, synthetic construct
  source 1..22: mol_type = other RNA
ttaattctgtttacccttacta

SEQ ID NO: 155259 - RNA, 22 nt, synthetic construct
  source 1..22: mol_type = other RNA
ttaattcttaaactgccaaacc

SEQ ID NO: 155260 - RNA, 22 nt, synthetic construct
  source 1..22: mol_type = other RNA
ttaattcttttgctgtataccc

SEQ ID NO: 155261 - RNA, 22 nt, synthetic construct
  source 1..22: mol_type = other RNA
ttaattgagctgtccccaccgc

SEQ ID NO: 155262 - RNA, 22 nt, synthetic construct
  source 1..22: mol_type = other RNA
ttaattgggggaaaattgacat

SEQ ID NO: 155263 - RNA, 22 nt, synthetic construct
  source 1..22: mol_type = other RNA
ttaatttagatgagagtggcct

SEQ ID NO: 155264 - RNA, 22 nt, synthetic construct
  source 1..22: mol_type = other RNA
ttaatttagcgttcatccaaat

SEQ ID NO: 155265 - RNA, 22 nt, synthetic construct
  source 1..22: mol_type = other RNA
ttaatttccacccatgaagcca

SEQ ID NO: 155266 - RNA, 22 nt, synthetic construct
  source 1..22: mol_type = other RNA
ttaatttgaggtctaggctaat

SEQ ID NO: 155267 - RNA, 22 nt, synthetic construct
  source 1..22: mol_type = other RNA
ttaatttggcttggggaacagt

SEQ ID NO: 155268 - RNA, 22 nt, synthetic construct
  source 1..22: mol_type = other RNA
ttaatttgggtttgagtttcca

SEQ ID NO: 155269 - RNA, 22 nt, synthetic construct
  source 1..22: mol_type = other RNA
ttaattttctgactctgtgctt

SEQ ID NO: 155270 - RNA, 22 nt, synthetic construct
  source 1..22: mol_type = other RNA
ttaattttgagagtgcagtatg

SEQ ID NO: 155271 - RNA, 22 nt, synthetic construct
  source 1..22: mol_type = other RNA
ttaatttttgtcaagtgactcc

SEQ ID NO: 155272 - RNA, 22 nt, synthetic construct
  source 1..22: mol_type = other RNA
ttacaaaaacacactgagcttt

SEQ ID NO: 155273 - RNA, 22 nt, synthetic construct
  source 1..22: mol_type = other RNA
ttacaaaagaacaggacttttg

SEQ ID NO: 155274 - RNA, 22 nt, synthetic construct
  source 1..22: mol_type = other RNA
ttacaaaataggcagtcctcta

SEQ ID NO: 155275 - RNA, 22 nt, synthetic construct
  source 1..22: mol_type = other RNA
ttacaaaatatgtaatgacctg

SEQ ID NO: 155276 - RNA, 22 nt, synthetic construct
  source 1..22: mol_type = other RNA
ttacaaatgaaagtcagctaat

SEQ ID NO: 155277 - RNA, 22 nt, synthetic construct
  source 1..22: mol_type = other RNA
ttacaacagcaaggctcctgca

SEQ ID NO: 155278 - RNA, 22 nt, synthetic construct
  source 1..22: mol_type = other RNA
ttacaactactcgggaggctga

SEQ ID NO: 155279 - RNA, 22 nt, synthetic construct
  source 1..22: mol_type = other RNA
ttacaactctaataacagccta

SEQ ID NO: 155280 - RNA, 22 nt, synthetic construct
  source 1..22: mol_type = other RNA
ttacaactggtttctgcatact

SEQ ID NO: 155281 - RNA, 22 nt, synthetic construct
  source 1..22: mol_type = other RNA
ttacaaggattgaatggaaaga

SEQ ID NO: 155282 - RNA, 22 nt, synthetic construct
  source 1..22: mol_type = other RNA
ttacaagggtgacagagccgag

SEQ ID NO: 155283 - RNA, 22 nt, synthetic construct
  source 1..22: mol_type = other RNA
ttacaagtacatgaaatactca

SEQ ID NO: 155284 - RNA, 22 nt, synthetic construct
  source 1..22: mol_type = other RNA
ttacaataatatgcctcatgca

SEQ ID NO: 155285 - RNA, 22 nt, synthetic construct
  source 1..22: mol_type = other RNA
ttacaataatgcacatgggcat

SEQ ID NO: 155286 - RNA, 22 nt, synthetic construct
  source 1..22: mol_type = other RNA
ttacaatgaatatgtactacct

SEQ ID NO: 155287 - RNA, 22 nt, synthetic construct
  source 1..22: mol_type = other RNA
ttacaatggaaatgaagtattg

SEQ ID NO: 155288 - RNA, 22 nt, synthetic construct
  source 1..22: mol_type = other RNA
ttacaatgtaaggtgcacgctg

SEQ ID NO: 155289 - RNA, 22 nt, synthetic construct
  source 1..22: mol_type = other RNA
ttacaattcctttctaggcatc

SEQ ID NO: 155290 - RNA, 22 nt, synthetic construct
  source 1..22: mol_type = other RNA
ttacacaagtgtttcatttaca

SEQ ID NO: 155291 - RNA, 22 nt, synthetic construct
  source 1..22: mol_type = other RNA
ttacacacacctaccaccatgc

SEQ ID NO: 155292 - RNA, 22 nt, synthetic construct
  source 1..22: mol_type = other RNA
ttacacacacgtttatattcct

SEQ ID NO: 155293 - RNA, 22 nt, synthetic construct
  source 1..22: mol_type = other RNA
ttacacacctgaaattctcaaa

SEQ ID NO: 155294 - RNA, 22 nt, synthetic construct
  source 1..22: mol_type = other RNA
ttacacagaaagcctcttcaga

SEQ ID NO: 155295 - RNA, 22 nt, synthetic construct
  source 1..22: mol_type = other RNA
ttacacaggtagacatgtgcca

SEQ ID NO: 155296 - RNA, 22 nt, synthetic construct
  source 1..22: mol_type = other RNA
ttacacatctcccataccacct

SEQ ID NO: 155297 - RNA, 22 nt, synthetic construct
  source 1..22: mol_type = other RNA
ttacacatgtcagccacaagac

SEQ ID NO: 155298 - RNA, 22 nt, synthetic construct
  source 1..22: mol_type = other RNA
ttacacattaggctctgggtca

SEQ ID NO: 155299 - RNA, 22 nt, synthetic construct
  source 1..22: mol_type = other RNA
ttacaccatgcaggttcatgtg

SEQ ID NO: 155300 - RNA, 22 nt, synthetic construct
  source 1..22: mol_type = other RNA
ttacaccctaggtagggttggg

SEQ ID NO: 155301 - RNA, 22 nt, synthetic construct
  source 1..22: mol_type = other RNA
ttacacgccttcgcgggcacct

SEQ ID NO: 155302 - RNA, 22 nt, synthetic construct
  source 1..22: mol_type = other RNA
ttacactatggcttttgagtgt

SEQ ID NO: 155303 - RNA, 22 nt, synthetic construct
  source 1..22: mol_type = other RNA
ttacactcaaaagccatagtgt

SEQ ID NO: 155304 - RNA, 22 nt, synthetic construct
  source 1..22: mol_type = other RNA
ttacacttccagtacatctcaa

SEQ ID NO: 155305 - RNA, 22 nt, synthetic construct
  source 1..22: mol_type = other RNA
ttacacttggagttttccccct

SEQ ID NO: 155306 - RNA, 22 nt, synthetic construct
  source 1..22: mol_type = other RNA
ttacagaaatataccttatgtg

SEQ ID NO: 155307 - RNA, 22 nt, synthetic construct
  source 1..22: mol_type = other RNA
ttacagactgattaatttgagg

SEQ ID NO: 155308 - RNA, 22 nt, synthetic construct
  source 1..22: mol_type = other RNA
ttacagatatcacccagaccaa

SEQ ID NO: 155309 - RNA, 22 nt, synthetic construct
  source 1..22: mol_type = other RNA
ttacagcagatctgcttgcaga

SEQ ID NO: 155310 - RNA, 22 nt, synthetic construct
  source 1..22: mol_type = other RNA
ttacagcagctctagcaaacaa

SEQ ID NO: 155311 - RNA, 22 nt, synthetic construct
  source 1..22: mol_type = other RNA
ttacagcatttcagccaaagct

SEQ ID NO: 155312 - RNA, 22 nt, synthetic construct
  source 1..22: mol_type = other RNA
ttacagctcttctcagttgcag

SEQ ID NO: 155313 - RNA, 22 nt, synthetic construct
  source 1..22: mol_type = other RNA
ttacaggatatcagaagtgctg

SEQ ID NO: 155314 - RNA, 22 nt, synthetic construct
  source 1..22: mol_type = other RNA
ttacaggcatgagccactgcgg

SEQ ID NO: 155315 - RNA, 22 nt, synthetic construct
  source 1..22: mol_type = other RNA
ttacaggcatgagtcgccatac

SEQ ID NO: 155316 - RNA, 22 nt, synthetic construct
  source 1..22: mol_type = other RNA
ttacaggcgcacgccatctcgc

SEQ ID NO: 155317 - RNA, 22 nt, synthetic construct
  source 1..22: mol_type = other RNA
ttacaggcgtgagccacctcat

SEQ ID NO: 155318 - RNA, 22 nt, synthetic construct
  source 1..22: mol_type = other RNA
ttacaggggactttgatgtttt

SEQ ID NO: 155319 - RNA, 22 nt, synthetic construct
  source 1..22: mol_type = other RNA
ttacaggtcaaactcacttatt

SEQ ID NO: 155320 - RNA, 22 nt, synthetic construct
  source 1..22: mol_type = other RNA
ttacagtaagatcctggattgc

SEQ ID NO: 155321 - RNA, 22 nt, synthetic construct
  source 1..22: mol_type = other RNA
ttacagtaaggtttccctgggg

SEQ ID NO: 155322 - RNA, 22 nt, synthetic construct
  source 1..22: mol_type = other RNA
ttacagtagccaaaggtagaaa

SEQ ID NO: 155323 - RNA, 22 nt, synthetic construct
  source 1..22: mol_type = other RNA
ttacagtataggggaactcttg

SEQ ID NO: 155324 - RNA, 22 nt, synthetic construct
  source 1..22: mol_type = other RNA
ttacagtcatcacagtccagga

SEQ ID NO: 155325 - RNA, 22 nt, synthetic construct
  source 1..22: mol_type = other RNA
ttacagtctcgaccccctgggc

SEQ ID NO: 155326 - RNA, 22 nt, synthetic construct
  source 1..22: mol_type = other RNA
ttacagtgacatatgccggctg

SEQ ID NO: 155327 - RNA, 22 nt, synthetic construct
  source 1..22: mol_type = other RNA
ttacagttatgtcagtcaacac

SEQ ID NO: 155328 - RNA, 22 nt, synthetic construct
  source 1..22: mol_type = other RNA
ttacatacttcaaagggtcact

SEQ ID NO: 155329 - RNA, 22 nt, synthetic construct
  source 1..22: mol_type = other RNA
ttacatagcaaggaagcagaat

SEQ ID NO: 155330 - RNA, 22 nt, synthetic construct
  source 1..22: mol_type = other RNA
ttacataggcttagtacagcca

SEQ ID NO: 155331 - RNA, 22 nt, synthetic construct
  source 1..22: mol_type = other RNA
ttacatagtgctcttctgatca

SEQ ID NO: 155332 - RNA, 22 nt, synthetic construct
  source 1..22: mol_type = other RNA
ttacatatagaagtaaatcccg

SEQ ID NO: 155333 - RNA, 22 nt, synthetic construct
  source 1..22: mol_type = other RNA
ttacatcagcagtgaccatatt

SEQ ID NO: 155334 - RNA, 22 nt, synthetic construct
  source 1..22: mol_type = other RNA
ttacatgaatggaaaattcttg

SEQ ID NO: 155335 - RNA, 22 nt, synthetic construct
  source 1..22: mol_type = other RNA
ttacatgaggtcacccaagcca

SEQ ID NO: 155336 - RNA, 22 nt, synthetic construct
  source 1..22: mol_type = other RNA
ttacatgcttagccttccagag

SEQ ID NO: 155337 - RNA, 22 nt, synthetic construct
  source 1..22: mol_type = other RNA
ttacatggttctgtgctagatg

SEQ ID NO: 155338 - RNA, 22 nt, synthetic construct
  source 1..22: mol_type = other RNA
ttacatgtagttttccctgtgt

SEQ ID NO: 155339 - RNA, 22 nt, synthetic construct
  source 1..22: mol_type = other RNA
ttacatgtttaactatcctatg

SEQ ID NO: 155340 - RNA, 22 nt, synthetic construct
  source 1..22: mol_type = other RNA
ttacattaaagacagctactaa

SEQ ID NO: 155341 - RNA, 22 nt, synthetic construct
  source 1..22: mol_type = other RNA
ttacattagagaagaatgagaa

SEQ ID NO: 155342 - RNA, 22 nt, synthetic construct
  source 1..22: mol_type = other RNA
ttacattgccttcgcagggtga

SEQ ID NO: 155343 - RNA, 22 nt, synthetic construct
  source 1..22: mol_type = other RNA
ttacattgtaatcctgtttctc

SEQ ID NO: 155344 - RNA, 22 nt, synthetic construct
  source 1..22: mol_type = other RNA
ttacatttgcttaggctgttat

SEQ ID NO: 155345 - RNA, 22 nt, synthetic construct
  source 1..22: mol_type = other RNA
ttaccaaaacagcttcttgtta

SEQ ID NO: 155346 - RNA, 22 nt, synthetic construct
  source 1..22: mol_type = other RNA
ttaccaaaacctggtatgagtg

SEQ ID NO: 155347 - RNA, 22 nt, synthetic construct
  source 1..22: mol_type = other RNA
ttaccaaggctaagttgagaaa

SEQ ID NO: 155348 - RNA, 22 nt, synthetic construct
  source 1..22: mol_type = other RNA
ttaccaagggtgtgtttaattt

SEQ ID NO: 155349 - RNA, 22 nt, synthetic construct
  source 1..22: mol_type = other RNA
ttaccaagtgccgcgttttttg

SEQ ID NO: 155350 - RNA, 22 nt, synthetic construct
  source 1..22: mol_type = other RNA
ttaccaagttgaatttctgtcc

SEQ ID NO: 155351 - RNA, 22 nt, synthetic construct
  source 1..22: mol_type = other RNA
ttaccaataaaagcctcatttg

SEQ ID NO: 155352 - RNA, 22 nt, synthetic construct
  source 1..22: mol_type = other RNA
ttaccaccaagaaaaagcagag

SEQ ID NO: 155353 - RNA, 22 nt, synthetic construct
  source 1..22: mol_type = other RNA
ttaccactagcaaactactgat

SEQ ID NO: 155354 - RNA, 22 nt, synthetic construct
  source 1..22: mol_type = other RNA
ttaccactataatccagatgga

SEQ ID NO: 155355 - RNA, 22 nt, synthetic construct
  source 1..22: mol_type = other RNA
ttaccactgaagtgttgagagg

SEQ ID NO: 155356 - RNA, 22 nt, synthetic construct
  source 1..22: mol_type = other RNA
ttaccagcttacagcagatctg

SEQ ID NO: 155357 - RNA, 22 nt, synthetic construct
  source 1..22: mol_type = other RNA
ttaccaggctggaagaatttta

SEQ ID NO: 155358 - RNA, 22 nt, synthetic construct
  source 1..22: mol_type = other RNA
ttaccagtgcttgcagccttcc

SEQ ID NO: 155359 - RNA, 22 nt, synthetic construct
  source 1..22: mol_type = other RNA
ttaccataaaaccatttttcag

SEQ ID NO: 155360 - RNA, 22 nt, synthetic construct
  source 1..22: mol_type = other RNA
ttaccataaagtcttccatttt

SEQ ID NO: 155361 - RNA, 22 nt, synthetic construct
  source 1..22: mol_type = other RNA
ttaccatatacacaaaaagatc

SEQ ID NO: 155362 - RNA, 22 nt, synthetic construct
  source 1..22: mol_type = other RNA
ttaccatctaaagccaggcttt

SEQ ID NO: 155363 - RNA, 22 nt, synthetic construct
  source 1..22: mol_type = other RNA
ttaccatctgacatatgttttg

SEQ ID NO: 155364 - RNA, 22 nt, synthetic construct
  source 1..22: mol_type = other RNA
ttaccatgtttccataaaaagc

SEQ ID NO: 155365 - RNA, 22 nt, synthetic construct
  source 1..22: mol_type = other RNA
ttaccatttgaccttccttgtg

SEQ ID NO: 155366 - RNA, 22 nt, synthetic construct
  source 1..22: mol_type = other RNA
ttacccaaagactttgttttgt

SEQ ID NO: 155367 - RNA, 22 nt, synthetic construct
  source 1..22: mol_type = other RNA
ttacccaacatgagagaaaatt

SEQ ID NO: 155368 - RNA, 22 nt, synthetic construct
  source 1..22: mol_type = other RNA
ttacccacaaaagaaaattttc

SEQ ID NO: 155369 - RNA, 22 nt, synthetic construct
  source 1..22: mol_type = other RNA
ttacccaggcatgatggctcaa

SEQ ID NO: 155370 - RNA, 22 nt, synthetic construct
  source 1..22: mol_type = other RNA
ttacccagtgtgtttgtttgct

SEQ ID NO: 155371 - RNA, 22 nt, synthetic construct
  source 1..22: mol_type = other RNA
ttaccccattcactcagcataa

SEQ ID NO: 155372 - RNA, 22 nt, synthetic construct
  source 1..22: mol_type = other RNA
ttacccccatcacactggtcac

SEQ ID NO: 155373 - RNA, 22 nt, synthetic construct
  source 1..22: mol_type = other RNA
ttacccctactttttgtcacac

SEQ ID NO: 155374 - RNA, 22 nt, synthetic construct
  source 1..22: mol_type = other RNA
ttacccctgagaacttcagtat

SEQ ID NO: 155375 - RNA, 22 nt, synthetic construct
  source 1..22: mol_type = other RNA
ttaccccttaaattccaaaagt

SEQ ID NO: 155376 - RNA, 22 nt, synthetic construct
  source 1..22: mol_type = other RNA
ttacccggagaggtgaactatt

SEQ ID NO: 155377 - RNA, 22 nt, synthetic construct
  source 1..22: mol_type = other RNA
ttacccgtggaaatacttgaac

SEQ ID NO: 155378 - RNA, 22 nt, synthetic construct
  source 1..22: mol_type = other RNA
ttaccctaataacaaaatagga

SEQ ID NO: 155379 - RNA, 22 nt, synthetic construct
  source 1..22: mol_type = other RNA
ttaccctcacagtcacaaagct

SEQ ID NO: 155380 - RNA, 22 nt, synthetic construct
  source 1..22: mol_type = other RNA
ttaccctcattttataagggtg

SEQ ID NO: 155381 - RNA, 22 nt, synthetic construct
  source 1..22: mol_type = other RNA
ttaccctctagctccccattcc

SEQ ID NO: 155382 - RNA, 22 nt, synthetic construct
  source 1..22: mol_type = other RNA
ttaccctctggaatgcccatcc

SEQ ID NO: 155383 - RNA, 22 nt, synthetic construct
  source 1..22: mol_type = other RNA
ttaccctgctggaacgaatatt

SEQ ID NO: 155384 - RNA, 22 nt, synthetic construct
  source 1..22: mol_type = other RNA
ttacccttactaaattttgagg

SEQ ID NO: 155385 - RNA, 22 nt, synthetic construct
  source 1..22: mol_type = other RNA
ttaccctttactcagattcacc

SEQ ID NO: 155386 - RNA, 22 nt, synthetic construct
  source 1..22: mol_type = other RNA
ttaccggcatccgccaccacgc

SEQ ID NO: 155387 - RNA, 22 nt, synthetic construct
  source 1..22: mol_type = other RNA
ttacctaagcatcgtgaagtct

SEQ ID NO: 155388 - RNA, 22 nt, synthetic construct
  source 1..22: mol_type = other RNA
ttacctatgaataggtgtgtgt

SEQ ID NO: 155389 - RNA, 22 nt, synthetic construct
  source 1..22: mol_type = other RNA
ttacctcaaaggagagaagagg

SEQ ID NO: 155390 - RNA, 22 nt, synthetic construct
  source 1..22: mol_type = other RNA
ttacctcccatgcattcgtccc

SEQ ID NO: 155391 - RNA, 22 nt, synthetic construct
  source 1..22: mol_type = other RNA
ttaccttatagatgacgaaagt

SEQ ID NO: 155392 - RNA, 22 nt, synthetic construct
  source 1..22: mol_type = other RNA
ttaccttctaaaatcatcacag

SEQ ID NO: 155393 - RNA, 22 nt, synthetic construct
  source 1..22: mol_type = other RNA
ttacctttatctttggatatcc

SEQ ID NO: 155394 - RNA, 22 nt, synthetic construct
  source 1..22: mol_type = other RNA
ttacgaggacagactgcagttg

SEQ ID NO: 155395 - RNA, 22 nt, synthetic construct
  source 1..22: mol_type = other RNA
ttacgagttatgcaagatgtca

SEQ ID NO: 155396 - RNA, 22 nt, synthetic construct
  source 1..22: mol_type = other RNA
ttacgatgaaattgaccattcc

SEQ ID NO: 155397 - RNA, 22 nt, synthetic construct
  source 1..22: mol_type = other RNA
ttacgcgtggatgtgtgcacaa

SEQ ID NO: 155398 - RNA, 22 nt, synthetic construct
  source 1..22: mol_type = other RNA
ttacgctgccaaaagccaagag

SEQ ID NO: 155399 - RNA, 22 nt, synthetic construct
  source 1..22: mol_type = other RNA
ttacggttccctgtagagattt

SEQ ID NO: 155400 - RNA, 22 nt, synthetic construct
  source 1..22: mol_type = other RNA
ttacgtactaggtatcacagtg

SEQ ID NO: 155401 - RNA, 22 nt, synthetic construct
  source 1..22: mol_type = other RNA
ttactaaaaagaaaaagttggg

SEQ ID NO: 155402 - RNA, 22 nt, synthetic construct
  source 1..22: mol_type = other RNA
ttactaaactgaacgaagtgaa

SEQ ID NO: 155403 - RNA, 22 nt, synthetic construct
  source 1..22: mol_type = other RNA
ttactaaatgatctttcaaggg

SEQ ID NO: 155404 - RNA, 22 nt, synthetic construct
  source 1..22: mol_type = other RNA
ttactaaattttgaggcttttg

SEQ ID NO: 155405 - RNA, 22 nt, synthetic construct
  source 1..22: mol_type = other RNA
ttactaagaagtgaaactgctg

SEQ ID NO: 155406 - RNA, 22 nt, synthetic construct
  source 1..22: mol_type = other RNA
ttactaccaccactaatgtcac

SEQ ID NO: 155407 - RNA, 22 nt, synthetic construct
  source 1..22: mol_type = other RNA
ttactacgaagctacagtaatc

SEQ ID NO: 155408 - RNA, 22 nt, synthetic construct
  source 1..22: mol_type = other RNA
ttactactgcattttttgccaa

SEQ ID NO: 155409 - RNA, 22 nt, synthetic construct
  source 1..22: mol_type = other RNA
ttactactgtactgtttagcat

SEQ ID NO: 155410 - RNA, 22 nt, synthetic construct
  source 1..22: mol_type = other RNA
ttactagaagcactttttacca

SEQ ID NO: 155411 - RNA, 22 nt, synthetic construct
  source 1..22: mol_type = other RNA
ttactagatcaagcccttcctt

SEQ ID NO: 155412 - RNA, 22 nt, synthetic construct
  source 1..22: mol_type = other RNA
ttactagttgtgctacctcaaa

SEQ ID NO: 155413 - RNA, 22 nt, synthetic construct
  source 1..22: mol_type = other RNA
ttactatatgatccagcagttt

SEQ ID NO: 155414 - RNA, 22 nt, synthetic construct
  source 1..22: mol_type = other RNA
ttactcaaatccaaattcacag

SEQ ID NO: 155415 - RNA, 22 nt, synthetic construct
  source 1..22: mol_type = other RNA
ttactcagattcaccaattgtt

SEQ ID NO: 155416 - RNA, 22 nt, synthetic construct
  source 1..22: mol_type = other RNA
ttactcagtctcgaaaaggaat

SEQ ID NO: 155417 - RNA, 22 nt, synthetic construct
  source 1..22: mol_type = other RNA
ttactcatgtctacctgtcttt

SEQ ID NO: 155418 - RNA, 22 nt, synthetic construct
  source 1..22: mol_type = other RNA
ttactcattatggttgttggct

SEQ ID NO: 155419 - RNA, 22 nt, synthetic construct
  source 1..22: mol_type = other RNA
ttactccaagaaggctagcaca

SEQ ID NO: 155420 - RNA, 22 nt, synthetic construct
  source 1..22: mol_type = other RNA
ttactcccgatttcagttaact

SEQ ID NO: 155421 - RNA, 22 nt, synthetic construct
  source 1..22: mol_type = other RNA
ttactcctgagcaaggaaggaa

SEQ ID NO: 155422 - RNA, 22 nt, synthetic construct
  source 1..22: mol_type = other RNA
ttactcgagggtagcttttcct

SEQ ID NO: 155423 - RNA, 22 nt, synthetic construct
  source 1..22: mol_type = other RNA
ttactcggtatgtacccaatgg

SEQ ID NO: 155424 - RNA, 22 nt, synthetic construct
  source 1..22: mol_type = other RNA
ttactcgtggttatagccataa

SEQ ID NO: 155425 - RNA, 22 nt, synthetic construct
  source 1..22: mol_type = other RNA
ttactctaatggggaaatagat

SEQ ID NO: 155426 - RNA, 22 nt, synthetic construct
  source 1..22: mol_type = other RNA
ttactctcaaataatttggcaa

SEQ ID NO: 155427 - RNA, 22 nt, synthetic construct
  source 1..22: mol_type = other RNA
ttactctctctgcctcggcaca

SEQ ID NO: 155428 - RNA, 22 nt, synthetic construct
  source 1..22: mol_type = other RNA
ttactctctttaattatgagca

SEQ ID NO: 155429 - RNA, 22 nt, synthetic construct
  source 1..22: mol_type = other RNA
ttactcttctactcactgtact

SEQ ID NO: 155430 - RNA, 22 nt, synthetic construct
  source 1..22: mol_type = other RNA
ttactgaaatcctagccccaaa

SEQ ID NO: 155431 - RNA, 22 nt, synthetic construct
  source 1..22: mol_type = other RNA
ttactgacaatagccaagacat

SEQ ID NO: 155432 - RNA, 22 nt, synthetic construct
  source 1..22: mol_type = other RNA
ttactgactcaatcttcttatt

SEQ ID NO: 155433 - RNA, 22 nt, synthetic construct
  source 1..22: mol_type = other RNA
ttactgatctgctcaagttttc

SEQ ID NO: 155434 - RNA, 22 nt, synthetic construct
  source 1..22: mol_type = other RNA
ttactgatcttttctgacaatt

SEQ ID NO: 155435 - RNA, 22 nt, synthetic construct
  source 1..22: mol_type = other RNA
ttactgattagaaggattgttc

SEQ ID NO: 155436 - RNA, 22 nt, synthetic construct
  source 1..22: mol_type = other RNA
ttactgatttatagtgtttcct

SEQ ID NO: 155437 - RNA, 22 nt, synthetic construct
  source 1..22: mol_type = other RNA
ttactgcaacctccgtttttca

SEQ ID NO: 155438 - RNA, 22 nt, synthetic construct
  source 1..22: mol_type = other RNA
ttactgctataaacttccctct

SEQ ID NO: 155439 - RNA, 22 nt, synthetic construct
  source 1..22: mol_type = other RNA
ttactgctatacaaccggaaaa

SEQ ID NO: 155440 - RNA, 22 nt, synthetic construct
  source 1..22: mol_type = other RNA
ttactgcttgctgcactggcta

SEQ ID NO: 155441 - RNA, 22 nt, synthetic construct
  source 1..22: mol_type = other RNA
ttactggatacaaggtcaatct

SEQ ID NO: 155442 - RNA, 22 nt, synthetic construct
  source 1..22: mol_type = other RNA
ttactggtgttaggcaatcctt

SEQ ID NO: 155443 - RNA, 22 nt, synthetic construct
  source 1..22: mol_type = other RNA
ttactgtaagttcctggactgt

SEQ ID NO: 155444 - RNA, 22 nt, synthetic construct
  source 1..22: mol_type = other RNA
ttactgtacaaagatttacccc

SEQ ID NO: 155445 - RNA, 22 nt, synthetic construct
  source 1..22: mol_type = other RNA
ttactgtattaggatgtgtacc

SEQ ID NO: 155446 - RNA, 22 nt, synthetic construct
  source 1..22: mol_type = other RNA
ttactgtccaaacagtgaccac

SEQ ID NO: 155447 - RNA, 22 nt, synthetic construct
  source 1..22: mol_type = other RNA
ttactgtctgtgaaaataatac

SEQ ID NO: 155448 - RNA, 22 nt, synthetic construct
  source 1..22: mol_type = other RNA
ttactgttctccagtcccactg

SEQ ID NO: 155449 - RNA, 22 nt, synthetic construct
  source 1..22: mol_type = other RNA
ttactgtttcttagctatattc

SEQ ID NO: 155450 - RNA, 22 nt, synthetic construct
  source 1..22: mol_type = other RNA
ttacttaatttacccacaaaag

SEQ ID NO: 155451 - RNA, 22 nt, synthetic construct
  source 1..22: mol_type = other RNA
ttacttactagttgtgctacct

SEQ ID NO: 155452 - RNA, 22 nt, synthetic construct
  source 1..22: mol_type = other RNA
ttacttaggcagttattaagag

SEQ ID NO: 155453 - RNA, 22 nt, synthetic construct
  source 1..22: mol_type = other RNA
ttacttcatagatgttatgccc

SEQ ID NO: 155454 - RNA, 22 nt, synthetic construct
  source 1..22: mol_type = other RNA
ttacttccagctcacgttaccc

SEQ ID NO: 155455 - RNA, 22 nt, synthetic construct
  source 1..22: mol_type = other RNA
ttacttccagtgttttaggggg

SEQ ID NO: 155456 - RNA, 22 nt, synthetic construct
  source 1..22: mol_type = other RNA
ttacttcccttctcgaagtggt

SEQ ID NO: 155457 - RNA, 22 nt, synthetic construct
  source 1..22: mol_type = other RNA
ttacttctacagaatgttcaag

SEQ ID NO: 155458 - RNA, 22 nt, synthetic construct
  source 1..22: mol_type = other RNA
ttacttctcagctatagcttct

SEQ ID NO: 155459 - RNA, 22 nt, synthetic construct
  source 1..22: mol_type = other RNA
ttacttctggaaagttcaaatg

SEQ ID NO: 155460 - RNA, 22 nt, synthetic construct
  source 1..22: mol_type = other RNA
ttacttctttctctttcagcca

SEQ ID NO: 155461 - RNA, 22 nt, synthetic construct
  source 1..22: mol_type = other RNA
ttacttgaaatcatttcactct

SEQ ID NO: 155462 - RNA, 22 nt, synthetic construct
  source 1..22: mol_type = other RNA
ttacttgactattttaccctca

SEQ ID NO: 155463 - RNA, 22 nt, synthetic construct
  source 1..22: mol_type = other RNA
ttacttgagagcagagacacac

SEQ ID NO: 155464 - RNA, 22 nt, synthetic construct
  source 1..22: mol_type = other RNA
ttacttgagccccagaataggc

SEQ ID NO: 155465 - RNA, 22 nt, synthetic construct
  source 1..22: mol_type = other RNA
ttacttgcttggtttcacacgc

SEQ ID NO: 155466 - RNA, 22 nt, synthetic construct
  source 1..22: mol_type = other RNA
ttacttggctcctcccggctaa

SEQ ID NO: 155467 - RNA, 22 nt, synthetic construct
  source 1..22: mol_type = other RNA
ttacttggggagagtgggccca

SEQ ID NO: 155468 - RNA, 22 nt, synthetic construct
  source 1..22: mol_type = other RNA
ttacttgggtataaatgatgag

SEQ ID NO: 155469 - RNA, 22 nt, synthetic construct
  source 1..22: mol_type = other RNA
ttacttgtcatttctgcttagt

SEQ ID NO: 155470 - RNA, 22 nt, synthetic construct
  source 1..22: mol_type = other RNA
ttactttacagttatgtcagtc

SEQ ID NO: 155471 - RNA, 22 nt, synthetic construct
  source 1..22: mol_type = other RNA
ttactttcagctcaaacagctt

SEQ ID NO: 155472 - RNA, 22 nt, synthetic construct
  source 1..22: mol_type = other RNA
ttactttgcgaaacacactcgt

SEQ ID NO: 155473 - RNA, 22 nt, synthetic construct
  source 1..22: mol_type = other RNA
ttacttttaaagaaaggtctct

SEQ ID NO: 155474 - RNA, 22 nt, synthetic construct
  source 1..22: mol_type = other RNA
ttacttttagtttacactatgg

SEQ ID NO: 155475 - RNA, 22 nt, synthetic construct
  source 1..22: mol_type = other RNA
ttacttttttgtagagacagaa

SEQ ID NO: 155476 - RNA, 22 nt, synthetic construct
  source 1..22: mol_type = other RNA
ttagaaaacatatccttctaca

SEQ ID NO: 155477 - RNA, 22 nt, synthetic construct
  source 1..22: mol_type = other RNA
ttagaaaatacagttttgacca

SEQ ID NO: 155478 - RNA, 22 nt, synthetic construct
  source 1..22: mol_type = other RNA
ttagaaaatgcttatgtcttgt

SEQ ID NO: 155479 - RNA, 22 nt, synthetic construct
  source 1..22: mol_type = other RNA
ttagaaaattagctgactttca

SEQ ID NO: 155480 - RNA, 22 nt, synthetic construct
  source 1..22: mol_type = other RNA
ttagaaactggtgaactgggtg

SEQ ID NO: 155481 - RNA, 22 nt, synthetic construct
  source 1..22: mol_type = other RNA
ttagaaagaaaatccaaaagcc

SEQ ID NO: 155482 - RNA, 22 nt, synthetic construct
  source 1..22: mol_type = other RNA
ttagaaagctggactcattcca

SEQ ID NO: 155483 - RNA, 22 nt, synthetic construct
  source 1..22: mol_type = other RNA
ttagaaatacctgcaggttgat

SEQ ID NO: 155484 - RNA, 22 nt, synthetic construct
  source 1..22: mol_type = other RNA
ttagaaatgaagatggcctccc

SEQ ID NO: 155485 - RNA, 22 nt, synthetic construct
  source 1..22: mol_type = other RNA
ttagaaatgtggaagcagaact

SEQ ID NO: 155486 - RNA, 22 nt, synthetic construct
  source 1..22: mol_type = other RNA
ttagaaatttaaggaccaggta

SEQ ID NO: 155487 - RNA, 22 nt, synthetic construct
  source 1..22: mol_type = other RNA
ttagaaatttacccatttcttc

SEQ ID NO: 155488 - RNA, 22 nt, synthetic construct
  source 1..22: mol_type = other RNA
ttagaacatataatccaactgc

SEQ ID NO: 155489 - RNA, 22 nt, synthetic construct
  source 1..22: mol_type = other RNA
ttagaacatctggcagcagggg

SEQ ID NO: 155490 - RNA, 22 nt, synthetic construct
  source 1..22: mol_type = other RNA
ttagaactagaactgtgttaca

SEQ ID NO: 155491 - RNA, 22 nt, synthetic construct
  source 1..22: mol_type = other RNA
ttagaagaagacttaggagaaa

SEQ ID NO: 155492 - RNA, 22 nt, synthetic construct
  source 1..22: mol_type = other RNA
ttagaagaatgattatttgcgg

SEQ ID NO: 155493 - RNA, 22 nt, synthetic construct
  source 1..22: mol_type = other RNA
ttagaagacaatactgttatga

SEQ ID NO: 155494 - RNA, 22 nt, synthetic construct
  source 1..22: mol_type = other RNA
ttagaaggattgttcatgtctg

SEQ ID NO: 155495 - RNA, 22 nt, synthetic construct
  source 1..22: mol_type = other RNA
ttagaaggtaagaatgtcaagc

SEQ ID NO: 155496 - RNA, 22 nt, synthetic construct
  source 1..22: mol_type = other RNA
ttagaagtatcccagatgggga

SEQ ID NO: 155497 - RNA, 22 nt, synthetic construct
  source 1..22: mol_type = other RNA
ttagaataatacacttttcagg

SEQ ID NO: 155498 - RNA, 22 nt, synthetic construct
  source 1..22: mol_type = other RNA
ttagaatcatccggggagcttt

SEQ ID NO: 155499 - RNA, 22 nt, synthetic construct
  source 1..22: mol_type = other RNA
ttagaattacaggcatgagtcg

SEQ ID NO: 155500 - RNA, 22 nt, synthetic construct
  source 1..22: mol_type = other RNA
ttagaattcaggacagtcatcc

SEQ ID NO: 155501 - RNA, 22 nt, synthetic construct
  source 1..22: mol_type = other RNA
ttagaattcaggacagttattc

SEQ ID NO: 155502 - RNA, 22 nt, synthetic construct
  source 1..22: mol_type = other RNA
ttagaattctctctcaactggc

SEQ ID NO: 155503 - RNA, 22 nt, synthetic construct
  source 1..22: mol_type = other RNA
ttagaattttgcttttgctttg

SEQ ID NO: 155504 - RNA, 22 nt, synthetic construct
  source 1..22: mol_type = other RNA
ttagacactaactttctattcc

SEQ ID NO: 155505 - RNA, 22 nt, synthetic construct
  source 1..22: mol_type = other RNA
ttagacatgggctaaataaaac

SEQ ID NO: 155506 - RNA, 22 nt, synthetic construct
  source 1..22: mol_type = other RNA
ttagacctcctagattgacctt

SEQ ID NO: 155507 - RNA, 22 nt, synthetic construct
  source 1..22: mol_type = other RNA
ttagactgcacataaaaggata

SEQ ID NO: 155508 - RNA, 22 nt, synthetic construct
  source 1..22: mol_type = other RNA
ttagagaagaatgagaaacata

SEQ ID NO: 155509 - RNA, 22 nt, synthetic construct
  source 1..22: mol_type = other RNA
ttagagagatgcctgtgcttgt

SEQ ID NO: 155510 - RNA, 22 nt, synthetic construct
  source 1..22: mol_type = other RNA
ttagagccccaagaaagcaggt

SEQ ID NO: 155511 - RNA, 22 nt, synthetic construct
  source 1..22: mol_type = other RNA
ttagagcttttattttactctc

SEQ ID NO: 155512 - RNA, 22 nt, synthetic construct
  source 1..22: mol_type = other RNA
ttagaggctgcaccctcctcct

SEQ ID NO: 155513 - RNA, 22 nt, synthetic construct
  source 1..22: mol_type = other RNA
ttagaggctgtattgtaggaaa

SEQ ID NO: 155514 - RNA, 22 nt, synthetic construct
  source 1..22: mol_type = other RNA
ttagagggatgaatgttgtaca

SEQ ID NO: 155515 - RNA, 22 nt, synthetic construct
  source 1..22: mol_type = other RNA
ttagagggcttcatgctgggag

SEQ ID NO: 155516 - RNA, 22 nt, synthetic construct
  source 1..22: mol_type = other RNA
ttagagtaactgtcatcagcgt

SEQ ID NO: 155517 - RNA, 22 nt, synthetic construct
  source 1..22: mol_type = other RNA
ttagagtaagcaactgcatctt

SEQ ID NO: 155518 - RNA, 22 nt, synthetic construct
  source 1..22: mol_type = other RNA
ttagagtcagttgtttacttgg

SEQ ID NO: 155519 - RNA, 22 nt, synthetic construct
  source 1..22: mol_type = other RNA
ttagagtgaaaagaaacaagtg

SEQ ID NO: 155520 - RNA, 22 nt, synthetic construct
  source 1..22: mol_type = other RNA
ttagagtttgcattacatgaat

SEQ ID NO: 155521 - RNA, 22 nt, synthetic construct
  source 1..22: mol_type = other RNA
ttagataggatgggcagactcc

SEQ ID NO: 155522 - RNA, 22 nt, synthetic construct
  source 1..22: mol_type = other RNA
ttagatagtggtttgaagcttc

SEQ ID NO: 155523 - RNA, 22 nt, synthetic construct
  source 1..22: mol_type = other RNA
ttagatatcccatataagggga

SEQ ID NO: 155524 - RNA, 22 nt, synthetic construct
  source 1..22: mol_type = other RNA
ttagatcaagtcctttccagag

SEQ ID NO: 155525 - RNA, 22 nt, synthetic construct
  source 1..22: mol_type = other RNA
ttagatctcatgttaagtgttc

SEQ ID NO: 155526 - RNA, 22 nt, synthetic construct
  source 1..22: mol_type = other RNA
ttagatctgggataatgctatc

SEQ ID NO: 155527 - RNA, 22 nt, synthetic construct
  source 1..22: mol_type = other RNA
ttagatgagagtggcctaaatc

SEQ ID NO: 155528 - RNA, 22 nt, synthetic construct
  source 1..22: mol_type = other RNA
ttagatgagcccaggagttgca

SEQ ID NO: 155529 - RNA, 22 nt, synthetic construct
  source 1..22: mol_type = other RNA
ttagatgatgttttgaacgaat

SEQ ID NO: 155530 - RNA, 22 nt, synthetic construct
  source 1..22: mol_type = other RNA
ttagatggcttaggatcaccaa

SEQ ID NO: 155531 - RNA, 22 nt, synthetic construct
  source 1..22: mol_type = other RNA
ttagatggtaaaacaaattccc

SEQ ID NO: 155532 - RNA, 22 nt, synthetic construct
  source 1..22: mol_type = other RNA
ttagatggtgctgatttaaaat

SEQ ID NO: 155533 - RNA, 22 nt, synthetic construct
  source 1..22: mol_type = other RNA
ttagattacaaaagaacaggac

SEQ ID NO: 155534 - RNA, 22 nt, synthetic construct
  source 1..22: mol_type = other RNA
ttagattaggaaacagattgat

SEQ ID NO: 155535 - RNA, 22 nt, synthetic construct
  source 1..22: mol_type = other RNA
ttagattatatggtctaccatg

SEQ ID NO: 155536 - RNA, 22 nt, synthetic construct
  source 1..22: mol_type = other RNA
ttagattgttttgttgctattg

SEQ ID NO: 155537 - RNA, 22 nt, synthetic construct
  source 1..22: mol_type = other RNA
ttagatttatcaatagcagtgc

SEQ ID NO: 155538 - RNA, 22 nt, synthetic construct
  source 1..22: mol_type = other RNA
ttagatttatttttacccgtgg

SEQ ID NO: 155539 - RNA, 22 nt, synthetic construct
  source 1..22: mol_type = other RNA
ttagatttttcctttgcctaag

SEQ ID NO: 155540 - RNA, 22 nt, synthetic construct
  source 1..22: mol_type = other RNA
ttagcaaacatttatggaattg

SEQ ID NO: 155541 - RNA, 22 nt, synthetic construct
  source 1..22: mol_type = other RNA
ttagcaaagaggcaaaactcct

SEQ ID NO: 155542 - RNA, 22 nt, synthetic construct
  source 1..22: mol_type = other RNA
ttagcaagattactggatacaa

SEQ ID NO: 155543 - RNA, 22 nt, synthetic construct
  source 1..22: mol_type = other RNA
ttagcaatccaaggacagaaat

SEQ ID NO: 155544 - RNA, 22 nt, synthetic construct
  source 1..22: mol_type = other RNA
ttagcaatgcgaatcatctagg

SEQ ID NO: 155545 - RNA, 22 nt, synthetic construct
  source 1..22: mol_type = other RNA
ttagcacctttattaactagaa

SEQ ID NO: 155546 - RNA, 22 nt, synthetic construct
  source 1..22: mol_type = other RNA
ttagcaggactggactccttct

SEQ ID NO: 155547 - RNA, 22 nt, synthetic construct
  source 1..22: mol_type = other RNA
ttagcagttctgtacccttacg

SEQ ID NO: 155548 - RNA, 22 nt, synthetic construct
  source 1..22: mol_type = other RNA
ttagcatcaccatcatcatcag

SEQ ID NO: 155549 - RNA, 22 nt, synthetic construct
  source 1..22: mol_type = other RNA
ttagcatctagcacagaaccat

SEQ ID NO: 155550 - RNA, 22 nt, synthetic construct
  source 1..22: mol_type = other RNA
ttagcatgcctgacaaagtatg

SEQ ID NO: 155551 - RNA, 22 nt, synthetic construct
  source 1..22: mol_type = other RNA
ttagcatgttgctttgcgaaat

SEQ ID NO: 155552 - RNA, 22 nt, synthetic construct
  source 1..22: mol_type = other RNA
ttagccaacaaccataatgagt

SEQ ID NO: 155553 - RNA, 22 nt, synthetic construct
  source 1..22: mol_type = other RNA
ttagccaagcatggtggtaggt

SEQ ID NO: 155554 - RNA, 22 nt, synthetic construct
  source 1..22: mol_type = other RNA
ttagccacagcgttgttcagtt

SEQ ID NO: 155555 - RNA, 22 nt, synthetic construct
  source 1..22: mol_type = other RNA
ttagccactctgaattctctgg

SEQ ID NO: 155556 - RNA, 22 nt, synthetic construct
  source 1..22: mol_type = other RNA
ttagccaggcatgggggcgcgt

SEQ ID NO: 155557 - RNA, 22 nt, synthetic construct
  source 1..22: mol_type = other RNA
ttagccaggcgtggtggcggat

SEQ ID NO: 155558 - RNA, 22 nt, synthetic construct
  source 1..22: mol_type = other RNA
ttagcccaagctaccatttatt

SEQ ID NO: 155559 - RNA, 22 nt, synthetic construct
  source 1..22: mol_type = other RNA
ttagcccacttgttgatggggt

SEQ ID NO: 155560 - RNA, 22 nt, synthetic construct
  source 1..22: mol_type = other RNA
ttagcccatgtctaaagtattg

SEQ ID NO: 155561 - RNA, 22 nt, synthetic construct
  source 1..22: mol_type = other RNA
ttagccccctgaatacccctcc

SEQ ID NO: 155562 - RNA, 22 nt, synthetic construct
  source 1..22: mol_type = other RNA
ttagcccctgctgccagatgtt

SEQ ID NO: 155563 - RNA, 22 nt, synthetic construct
  source 1..22: mol_type = other RNA
ttagccgggaggagccaagtaa

SEQ ID NO: 155564 - RNA, 22 nt, synthetic construct
  source 1..22: mol_type = other RNA
ttagccgggtgtagtggtgtgt

SEQ ID NO: 155565 - RNA, 22 nt, synthetic construct
  source 1..22: mol_type = other RNA
ttagcctagacctcaaattaat

SEQ ID NO: 155566 - RNA, 22 nt, synthetic construct
  source 1..22: mol_type = other RNA
ttagccttccagagacaaagca

SEQ ID NO: 155567 - RNA, 22 nt, synthetic construct
  source 1..22: mol_type = other RNA
ttagccttgccattctcccagt

SEQ ID NO: 155568 - RNA, 22 nt, synthetic construct
  source 1..22: mol_type = other RNA
ttagccttggtaaaatcactaa

SEQ ID NO: 155569 - RNA, 22 nt, synthetic construct
  source 1..22: mol_type = other RNA
ttagccttttacaccctaggta

SEQ ID NO: 155570 - RNA, 22 nt, synthetic construct
  source 1..22: mol_type = other RNA
ttagcgaaagggattctggcca

SEQ ID NO: 155571 - RNA, 22 nt, synthetic construct
  source 1..22: mol_type = other RNA
ttagcgctgatgtgttgacctt

SEQ ID NO: 155572 - RNA, 22 nt, synthetic construct
  source 1..22: mol_type = other RNA
ttagcgctggaggtcgggctgc

SEQ ID NO: 155573 - RNA, 22 nt, synthetic construct
  source 1..22: mol_type = other RNA
ttagcggaatgactatagaaat

SEQ ID NO: 155574 - RNA, 22 nt, synthetic construct
  source 1..22: mol_type = other RNA
ttagcgttcatccaaattattg

SEQ ID NO: 155575 - RNA, 22 nt, synthetic construct
  source 1..22: mol_type = other RNA
ttagctaagtatgcagaaacca

SEQ ID NO: 155576 - RNA, 22 nt, synthetic construct
  source 1..22: mol_type = other RNA
ttagctaatttcagagagacct

SEQ ID NO: 155577 - RNA, 22 nt, synthetic construct
  source 1..22: mol_type = other RNA
ttagctacaaaagggaaaacaa

SEQ ID NO: 155578 - RNA, 22 nt, synthetic construct
  source 1..22: mol_type = other RNA
ttagctatattcacttttggaa

SEQ ID NO: 155579 - RNA, 22 nt, synthetic construct
  source 1..22: mol_type = other RNA
ttagctctcatgtcagagacac

SEQ ID NO: 155580 - RNA, 22 nt, synthetic construct
  source 1..22: mol_type = other RNA
ttagctcttaagcttaggtctt

SEQ ID NO: 155581 - RNA, 22 nt, synthetic construct
  source 1..22: mol_type = other RNA
ttagctcttcccttaacctttt

SEQ ID NO: 155582 - RNA, 22 nt, synthetic construct
  source 1..22: mol_type = other RNA
ttagctgactttcatttgtaat

SEQ ID NO: 155583 - RNA, 22 nt, synthetic construct
  source 1..22: mol_type = other RNA
ttagctgcctcttcctgttgct

SEQ ID NO: 155584 - RNA, 22 nt, synthetic construct
  source 1..22: mol_type = other RNA
ttagctggatgtggtgtggcat

SEQ ID NO: 155585 - RNA, 22 nt, synthetic construct
  source 1..22: mol_type = other RNA
ttagctggcaaaatggagacat

SEQ ID NO: 155586 - RNA, 22 nt, synthetic construct
  source 1..22: mol_type = other RNA
ttagctgggcgagatggcgtgc

SEQ ID NO: 155587 - RNA, 22 nt, synthetic construct
  source 1..22: mol_type = other RNA
ttagctggggcagcaaagcaag

SEQ ID NO: 155588 - RNA, 22 nt, synthetic construct
  source 1..22: mol_type = other RNA
ttagctgtctggattgattcca

SEQ ID NO: 155589 - RNA, 22 nt, synthetic construct
  source 1..22: mol_type = other RNA
ttagcttagaagaagacttagg

SEQ ID NO: 155590 - RNA, 22 nt, synthetic construct
  source 1..22: mol_type = other RNA
ttagcttcatataagtggaatc

SEQ ID NO: 155591 - RNA, 22 nt, synthetic construct
  source 1..22: mol_type = other RNA
ttagcttcctcaggatctacat

SEQ ID NO: 155592 - RNA, 22 nt, synthetic construct
  source 1..22: mol_type = other RNA
ttagcttctgaattgagatgta

SEQ ID NO: 155593 - RNA, 22 nt, synthetic construct
  source 1..22: mol_type = other RNA
ttagcttgctagtagcagaatc

SEQ ID NO: 155594 - RNA, 22 nt, synthetic construct
  source 1..22: mol_type = other RNA
ttagctttctcccagctgtcca

SEQ ID NO: 155595 - RNA, 22 nt, synthetic construct
  source 1..22: mol_type = other RNA
ttagcttttacgaggacagact

SEQ ID NO: 155596 - RNA, 22 nt, synthetic construct
  source 1..22: mol_type = other RNA
ttaggaaaatacatgaggcctc

SEQ ID NO: 155597 - RNA, 22 nt, synthetic construct
  source 1..22: mol_type = other RNA
ttaggaaaatagagttccatct

SEQ ID NO: 155598 - RNA, 22 nt, synthetic construct
  source 1..22: mol_type = other RNA
ttaggaagcacattccttccga

SEQ ID NO: 155599 - RNA, 22 nt, synthetic construct
  source 1..22: mol_type = other RNA
ttaggaagccactgcattcatc

SEQ ID NO: 155600 - RNA, 22 nt, synthetic construct
  source 1..22: mol_type = other RNA
ttaggaagctatggagcactgt

SEQ ID NO: 155601 - RNA, 22 nt, synthetic construct
  source 1..22: mol_type = other RNA
ttaggaagcttccttgatcagc

SEQ ID NO: 155602 - RNA, 22 nt, synthetic construct
  source 1..22: mol_type = other RNA
ttaggaatttacatttccattc

SEQ ID NO: 155603 - RNA, 22 nt, synthetic construct
  source 1..22: mol_type = other RNA
ttaggacaaggaaaggatggtt

SEQ ID NO: 155604 - RNA, 22 nt, synthetic construct
  source 1..22: mol_type = other RNA
ttaggagaaaagcttcataaca

SEQ ID NO: 155605 - RNA, 22 nt, synthetic construct
  source 1..22: mol_type = other RNA
ttaggaggctattaactttgaa

SEQ ID NO: 155606 - RNA, 22 nt, synthetic construct
  source 1..22: mol_type = other RNA
ttaggagtcaactaatcaaaca

SEQ ID NO: 155607 - RNA, 22 nt, synthetic construct
  source 1..22: mol_type = other RNA
ttaggatataagagtgggcaaa

SEQ ID NO: 155608 - RNA, 22 nt, synthetic construct
  source 1..22: mol_type = other RNA
ttaggatcaccaaagacttcag

SEQ ID NO: 155609 - RNA, 22 nt, synthetic construct
  source 1..22: mol_type = other RNA
ttaggatcccagtcctttggga

SEQ ID NO: 155610 - RNA, 22 nt, synthetic construct
  source 1..22: mol_type = other RNA
ttaggatgtgtacccgtgtgtt

SEQ ID NO: 155611 - RNA, 22 nt, synthetic construct
  source 1..22: mol_type = other RNA
ttaggcaaaggaaaaatctaac

SEQ ID NO: 155612 - RNA, 22 nt, synthetic construct
  source 1..22: mol_type = other RNA
ttaggcaatccttccgcctcag

SEQ ID NO: 155613 - RNA, 22 nt, synthetic construct
  source 1..22: mol_type = other RNA
ttaggcagaaccacctggggga

SEQ ID NO: 155614 - RNA, 22 nt, synthetic construct
  source 1..22: mol_type = other RNA
ttaggcagttattaagagtgtg

SEQ ID NO: 155615 - RNA, 22 nt, synthetic construct
  source 1..22: mol_type = other RNA
ttaggccactctcatctaaatt

SEQ ID NO: 155616 - RNA, 22 nt, synthetic construct
  source 1..22: mol_type = other RNA
ttaggccataaatcaaggtaca

SEQ ID NO: 155617 - RNA, 22 nt, synthetic construct
  source 1..22: mol_type = other RNA
ttaggccctctataattctgcc

SEQ ID NO: 155618 - RNA, 22 nt, synthetic construct
  source 1..22: mol_type = other RNA
ttaggctctgggtcagaatcgt

SEQ ID NO: 155619 - RNA, 22 nt, synthetic construct
  source 1..22: mol_type = other RNA
ttaggctctgtggtttcttgaa

SEQ ID NO: 155620 - RNA, 22 nt, synthetic construct
  source 1..22: mol_type = other RNA
ttaggctgaagcaggcttttta

SEQ ID NO: 155621 - RNA, 22 nt, synthetic construct
  source 1..22: mol_type = other RNA
ttaggctgtctccaacgctttt

SEQ ID NO: 155622 - RNA, 22 nt, synthetic construct
  source 1..22: mol_type = other RNA
ttaggctgttattagagttgta

SEQ ID NO: 155623 - RNA, 22 nt, synthetic construct
  source 1..22: mol_type = other RNA
ttaggctgttcaatttagaaaa

SEQ ID NO: 155624 - RNA, 22 nt, synthetic construct
  source 1..22: mol_type = other RNA
ttaggctgtttgagatctttct

SEQ ID NO: 155625 - RNA, 22 nt, synthetic construct
  source 1..22: mol_type = other RNA
ttagggaagatagtactgacca

SEQ ID NO: 155626 - RNA, 22 nt, synthetic construct
  source 1..22: mol_type = other RNA
ttagggacgaatgcatgggagg

SEQ ID NO: 155627 - RNA, 22 nt, synthetic construct
  source 1..22: mol_type = other RNA
ttagggacttatggagataaat

SEQ ID NO: 155628 - RNA, 22 nt, synthetic construct
  source 1..22: mol_type = other RNA
ttagggagactttcactgctca

SEQ ID NO: 155629 - RNA, 22 nt, synthetic construct
  source 1..22: mol_type = other RNA
ttagggagcatatatactctga

SEQ ID NO: 155630 - RNA, 22 nt, synthetic construct
  source 1..22: mol_type = other RNA
ttagggcctagaaatcatacac

SEQ ID NO: 155631 - RNA, 22 nt, synthetic construct
  source 1..22: mol_type = other RNA
ttaggggggaaaacacccttga

SEQ ID NO: 155632 - RNA, 22 nt, synthetic construct
  source 1..22: mol_type = other RNA
ttagggtaatgctggcttcatg

SEQ ID NO: 155633 - RNA, 22 nt, synthetic construct
  source 1..22: mol_type = other RNA
ttaggtaagaaaaattccctca

SEQ ID NO: 155634 - RNA, 22 nt, synthetic construct
  source 1..22: mol_type = other RNA
ttaggtagggataagaatacca

SEQ ID NO: 155635 - RNA, 22 nt, synthetic construct
  source 1..22: mol_type = other RNA
ttaggtagtcttgtcataacag

SEQ ID NO: 155636 - RNA, 22 nt, synthetic construct
  source 1..22: mol_type = other RNA
ttaggtattattttcacagaca

SEQ ID NO: 155637 - RNA, 22 nt, synthetic construct
  source 1..22: mol_type = other RNA
ttaggtcagaatacaaaaatga

SEQ ID NO: 155638 - RNA, 22 nt, synthetic construct
  source 1..22: mol_type = other RNA
ttaggtcatttttcacttctta

SEQ ID NO: 155639 - RNA, 22 nt, synthetic construct
  source 1..22: mol_type = other RNA
ttaggtctttgatccattttga

SEQ ID NO: 155640 - RNA, 22 nt, synthetic construct
  source 1..22: mol_type = other RNA
ttaggtgcacacaacactcaga

SEQ ID NO: 155641 - RNA, 22 nt, synthetic construct
  source 1..22: mol_type = other RNA
ttaggtgccccactccacacac

SEQ ID NO: 155642 - RNA, 22 nt, synthetic construct
  source 1..22: mol_type = other RNA
ttaggtgctggcttcaatatgc

SEQ ID NO: 155643 - RNA, 22 nt, synthetic construct
  source 1..22: mol_type = other RNA
ttaggtggtttgaaccccagaa

SEQ ID NO: 155644 - RNA, 22 nt, synthetic construct
  source 1..22: mol_type = other RNA
ttaggtgttttttccttctttg

SEQ ID NO: 155645 - RNA, 22 nt, synthetic construct
  source 1..22: mol_type = other RNA
ttaggttacgtactaggtatca

SEQ ID NO: 155646 - RNA, 22 nt, synthetic construct
  source 1..22: mol_type = other RNA
ttaggttgaaagttcagaatac

SEQ ID NO: 155647 - RNA, 22 nt, synthetic construct
  source 1..22: mol_type = other RNA
ttaggttgatggctgtactaag

SEQ ID NO: 155648 - RNA, 22 nt, synthetic construct
  source 1..22: mol_type = other RNA
ttaggtttctcatttttcaggg

SEQ ID NO: 155649 - RNA, 22 nt, synthetic construct
  source 1..22: mol_type = other RNA
ttaggtttttcttgtgggtatt

SEQ ID NO: 155650 - RNA, 22 nt, synthetic construct
  source 1..22: mol_type = other RNA
ttagtaaatatccgaaagaact

SEQ ID NO: 155651 - RNA, 22 nt, synthetic construct
  source 1..22: mol_type = other RNA
ttagtaaatctttggtgaaggt

SEQ ID NO: 155652 - RNA, 22 nt, synthetic construct
  source 1..22: mol_type = other RNA
ttagtaagaggtatcaccatct

SEQ ID NO: 155653 - RNA, 22 nt, synthetic construct
  source 1..22: mol_type = other RNA
ttagtaagggtaaacagaatta

SEQ ID NO: 155654 - RNA, 22 nt, synthetic construct
  source 1..22: mol_type = other RNA
ttagtaagtgtgagcaaaaata

SEQ ID NO: 155655 - RNA, 22 nt, synthetic construct
  source 1..22: mol_type = other RNA
ttagtaattctccactttcatg

SEQ ID NO: 155656 - RNA, 22 nt, synthetic construct
  source 1..22: mol_type = other RNA
ttagtacagccatcaacctaat

SEQ ID NO: 155657 - RNA, 22 nt, synthetic construct
  source 1..22: mol_type = other RNA
ttagtagaattctccagtgaag

SEQ ID NO: 155658 - RNA, 22 nt, synthetic construct
  source 1..22: mol_type = other RNA
ttagtagagatgaggttttacg

SEQ ID NO: 155659 - RNA, 22 nt, synthetic construct
  source 1..22: mol_type = other RNA
ttagtagctgtctttaatgtaa

SEQ ID NO: 155660 - RNA, 22 nt, synthetic construct
  source 1..22: mol_type = other RNA
ttagtaggaaaaccatgtcatg

SEQ ID NO: 155661 - RNA, 22 nt, synthetic construct
  source 1..22: mol_type = other RNA
ttagtaggtctccttgtatgga

SEQ ID NO: 155662 - RNA, 22 nt, synthetic construct
  source 1..22: mol_type = other RNA
ttagtagtaagttgtgtcattt

SEQ ID NO: 155663 - RNA, 22 nt, synthetic construct
  source 1..22: mol_type = other RNA
ttagtagttaggtggtttgaac

SEQ ID NO: 155664 - RNA, 22 nt, synthetic construct
  source 1..22: mol_type = other RNA
ttagtatacatgtttagcaaga

SEQ ID NO: 155665 - RNA, 22 nt, synthetic construct
  source 1..22: mol_type = other RNA
ttagtatattttcaaggcttgt

SEQ ID NO: 155666 - RNA, 22 nt, synthetic construct
  source 1..22: mol_type = other RNA
ttagtcatagcagtgggaagtg

SEQ ID NO: 155667 - RNA, 22 nt, synthetic construct
  source 1..22: mol_type = other RNA
ttagtcccctagtggatgctgg

SEQ ID NO: 155668 - RNA, 22 nt, synthetic construct
  source 1..22: mol_type = other RNA
ttagtctgacttctctcagagg

SEQ ID NO: 155669 - RNA, 22 nt, synthetic construct
  source 1..22: mol_type = other RNA
ttagtctgtagcttcacgtgca

SEQ ID NO: 155670 - RNA, 22 nt, synthetic construct
  source 1..22: mol_type = other RNA
ttagtcttctcagatctgttgc

SEQ ID NO: 155671 - RNA, 22 nt, synthetic construct
  source 1..22: mol_type = other RNA
ttagtcttgtcttttctttttc

SEQ ID NO: 155672 - RNA, 22 nt, synthetic construct
  source 1..22: mol_type = other RNA
ttagtgaaatagttggtcagaa

SEQ ID NO: 155673 - RNA, 22 nt, synthetic construct
  source 1..22: mol_type = other RNA
ttagtgaagcagagagagaaga

SEQ ID NO: 155674 - RNA, 22 nt, synthetic construct
  source 1..22: mol_type = other RNA
ttagtgaattcacagtagaaga

SEQ ID NO: 155675 - RNA, 22 nt, synthetic construct
  source 1..22: mol_type = other RNA
ttagtgactggcttaatgcata

SEQ ID NO: 155676 - RNA, 22 nt, synthetic construct
  source 1..22: mol_type = other RNA
ttagtgagggaggccatcttca

SEQ ID NO: 155677 - RNA, 22 nt, synthetic construct
  source 1..22: mol_type = other RNA
ttagtgatgtcttttgaagaag

SEQ ID NO: 155678 - RNA, 22 nt, synthetic construct
  source 1..22: mol_type = other RNA
ttagtgattttaccaaggctaa

SEQ ID NO: 155679 - RNA, 22 nt, synthetic construct
  source 1..22: mol_type = other RNA
ttagtgcagtatcttgaagaaa

SEQ ID NO: 155680 - RNA, 22 nt, synthetic construct
  source 1..22: mol_type = other RNA
ttagtgccttcagaaggagtcc

SEQ ID NO: 155681 - RNA, 22 nt, synthetic construct
  source 1..22: mol_type = other RNA
ttagtggaaaaactgcagcaat

SEQ ID NO: 155682 - RNA, 22 nt, synthetic construct
  source 1..22: mol_type = other RNA
ttagtggctcacagtgctccat

SEQ ID NO: 155683 - RNA, 22 nt, synthetic construct
  source 1..22: mol_type = other RNA
ttagtggtggtagtaaggatcg

SEQ ID NO: 155684 - RNA, 22 nt, synthetic construct
  source 1..22: mol_type = other RNA
ttagtggttgacccataaactg

SEQ ID NO: 155685 - RNA, 22 nt, synthetic construct
  source 1..22: mol_type = other RNA
ttagtgtattgtaccttgattt

SEQ ID NO: 155686 - RNA, 22 nt, synthetic construct
  source 1..22: mol_type = other RNA
ttagtgtctaatgggtacaggg

SEQ ID NO: 155687 - RNA, 22 nt, synthetic construct
  source 1..22: mol_type = other RNA
ttagtgttcccttcttaaatgt

SEQ ID NO: 155688 - RNA, 22 nt, synthetic construct
  source 1..22: mol_type = other RNA
ttagtgttctgtgtttatgaat

SEQ ID NO: 155689 - RNA, 22 nt, synthetic construct
  source 1..22: mol_type = other RNA
ttagtgttgcttggtgttgact

SEQ ID NO: 155690 - RNA, 22 nt, synthetic construct
  source 1..22: mol_type = other RNA
ttagttaaccttctggggttca

SEQ ID NO: 155691 - RNA, 22 nt, synthetic construct
  source 1..22: mol_type = other RNA
ttagttacatgaggtcacccaa

SEQ ID NO: 155692 - RNA, 22 nt, synthetic construct
  source 1..22: mol_type = other RNA
ttagttactcaaatccaaattc

SEQ ID NO: 155693 - RNA, 22 nt, synthetic construct
  source 1..22: mol_type = other RNA
ttagttatctcttagacctcct

SEQ ID NO: 155694 - RNA, 22 nt, synthetic construct
  source 1..22: mol_type = other RNA
ttagttattaaatgagacacct

SEQ ID NO: 155695 - RNA, 22 nt, synthetic construct
  source 1..22: mol_type = other RNA
ttagttcaagatgcataccaag

SEQ ID NO: 155696 - RNA, 22 nt, synthetic construct
  source 1..22: mol_type = other RNA
ttagttcctccttttgtagagg

SEQ ID NO: 155697 - RNA, 22 nt, synthetic construct
  source 1..22: mol_type = other RNA
ttagttccttttaagggaaaca

SEQ ID NO: 155698 - RNA, 22 nt, synthetic construct
  source 1..22: mol_type = other RNA
ttagttctgcttccacatttct

SEQ ID NO: 155699 - RNA, 22 nt, synthetic construct
  source 1..22: mol_type = other RNA
ttagttgactcctaaaacatgg

SEQ ID NO: 155700 - RNA, 22 nt, synthetic construct
  source 1..22: mol_type = other RNA
ttagttgtacttgacacaaagg

SEQ ID NO: 155701 - RNA, 22 nt, synthetic construct
  source 1..22: mol_type = other RNA
ttagtttacactatggcttttg

SEQ ID NO: 155702 - RNA, 22 nt, synthetic construct
  source 1..22: mol_type = other RNA
ttagtttcatctatgtcccctg

SEQ ID NO: 155703 - RNA, 22 nt, synthetic construct
  source 1..22: mol_type = other RNA
ttagtttgcaatacagttaacg

SEQ ID NO: 155704 - RNA, 22 nt, synthetic construct
  source 1..22: mol_type = other RNA
ttagtttgttgacccaatcatg

SEQ ID NO: 155705 - RNA, 22 nt, synthetic construct
  source 1..22: mol_type = other RNA
ttagttttcacttttgtgcaac

SEQ ID NO: 155706 - RNA, 22 nt, synthetic construct
  source 1..22: mol_type = other RNA
ttataaaaatggcacatactgc

SEQ ID NO: 155707 - RNA, 22 nt, synthetic construct
  source 1..22: mol_type = other RNA
ttataaaataggaagtccatga

SEQ ID NO: 155708 - RNA, 22 nt, synthetic construct
  source 1..22: mol_type = other RNA
ttataacataaaagcgtactgt

SEQ ID NO: 155709 - RNA, 22 nt, synthetic construct
  source 1..22: mol_type = other RNA
ttataaccttgaacttccaggc

SEQ ID NO: 155710 - RNA, 22 nt, synthetic construct
  source 1..22: mol_type = other RNA
ttataagcaaagatatgggtta

SEQ ID NO: 155711 - RNA, 22 nt, synthetic construct
  source 1..22: mol_type = other RNA
ttataagcttcctctggctgac

SEQ ID NO: 155712 - RNA, 22 nt, synthetic construct
  source 1..22: mol_type = other RNA
ttataagggtgataaaaaggag

SEQ ID NO: 155713 - RNA, 22 nt, synthetic construct
  source 1..22: mol_type = other RNA
ttataagttgggagtctatttc

SEQ ID NO: 155714 - RNA, 22 nt, synthetic construct
  source 1..22: mol_type = other RNA
ttataatcagccgtgattgcac

SEQ ID NO: 155715 - RNA, 22 nt, synthetic construct
  source 1..22: mol_type = other RNA
ttataatccattgggtacatac

SEQ ID NO: 155716 - RNA, 22 nt, synthetic construct
  source 1..22: mol_type = other RNA
ttataatgagatagaccagatg

SEQ ID NO: 155717 - RNA, 22 nt, synthetic construct
  source 1..22: mol_type = other RNA
ttataatgggcaatcagaaaaa

SEQ ID NO: 155718 - RNA, 22 nt, synthetic construct
  source 1..22: mol_type = other RNA
ttataatttctgagagtattgc

SEQ ID NO: 155719 - RNA, 22 nt, synthetic construct
  source 1..22: mol_type = other RNA
ttatacaaataactccagcttt

SEQ ID NO: 155720 - RNA, 22 nt, synthetic construct
  source 1..22: mol_type = other RNA
ttatacacacataagggggaat

SEQ ID NO: 155721 - RNA, 22 nt, synthetic construct
  source 1..22: mol_type = other RNA
ttatacagcaaatctctagaac

SEQ ID NO: 155722 - RNA, 22 nt, synthetic construct
  source 1..22: mol_type = other RNA
ttatacaggtgcttacagactg

SEQ ID NO: 155723 - RNA, 22 nt, synthetic construct
  source 1..22: mol_type = other RNA
ttatacagttggaactcttgcg

SEQ ID NO: 155724 - RNA, 22 nt, synthetic construct
  source 1..22: mol_type = other RNA
ttatacccaagtaaacaactga

SEQ ID NO: 155725 - RNA, 22 nt, synthetic construct
  source 1..22: mol_type = other RNA
ttatacctgttgaatagcaact

SEQ ID NO: 155726 - RNA, 22 nt, synthetic construct
  source 1..22: mol_type = other RNA
ttatactagtagaaagcaggtt

SEQ ID NO: 155727 - RNA, 22 nt, synthetic construct
  source 1..22: mol_type = other RNA
ttatagagggcctaaataaaac

SEQ ID NO: 155728 - RNA, 22 nt, synthetic construct
  source 1..22: mol_type = other RNA
ttatagatgacgaaagtgaagc

SEQ ID NO: 155729 - RNA, 22 nt, synthetic construct
  source 1..22: mol_type = other RNA
ttatagccataagagtccccaa

SEQ ID NO: 155730 - RNA, 22 nt, synthetic construct
  source 1..22: mol_type = other RNA
ttatagctccaaaagcgaaagg

SEQ ID NO: 155731 - RNA, 22 nt, synthetic construct
  source 1..22: mol_type = other RNA
ttataggcaatttagaattctc

SEQ ID NO: 155732 - RNA, 22 nt, synthetic construct
  source 1..22: mol_type = other RNA
ttataggttgaatagggcctca

SEQ ID NO: 155733 - RNA, 22 nt, synthetic construct
  source 1..22: mol_type = other RNA
ttatagtattacctcccatgca

SEQ ID NO: 155734 - RNA, 22 nt, synthetic construct
  source 1..22: mol_type = other RNA
ttatagtcttagctcttaagct

SEQ ID NO: 155735 - RNA, 22 nt, synthetic construct
  source 1..22: mol_type = other RNA
ttatagtggtaaggagccaaac

SEQ ID NO: 155736 - RNA, 22 nt, synthetic construct
  source 1..22: mol_type = other RNA
ttatagtgtttccttccagatg

SEQ ID NO: 155737 - RNA, 22 nt, synthetic construct
  source 1..22: mol_type = other RNA
ttatataaatgctcagtgggtt

SEQ ID NO: 155738 - RNA, 22 nt, synthetic construct
  source 1..22: mol_type = other RNA
ttatatccagattgatatctga

SEQ ID NO: 155739 - RNA, 22 nt, synthetic construct
  source 1..22: mol_type = other RNA
ttatatcctaaacacttagcat

SEQ ID NO: 155740 - RNA, 22 nt, synthetic construct
  source 1..22: mol_type = other RNA
ttatatcctcagggtaggaaaa

SEQ ID NO: 155741 - RNA, 22 nt, synthetic construct
  source 1..22: mol_type = other RNA
ttatatctttggaaaaatgtcc

SEQ ID NO: 155742 - RNA, 22 nt, synthetic construct
  source 1..22: mol_type = other RNA
ttatatgaataaaccacgcagt

SEQ ID NO: 155743 - RNA, 22 nt, synthetic construct
  source 1..22: mol_type = other RNA
ttatatgcattaagccagtcac

SEQ ID NO: 155744 - RNA, 22 nt, synthetic construct
  source 1..22: mol_type = other RNA
ttatatgcctagatgattcgca

SEQ ID NO: 155745 - RNA, 22 nt, synthetic construct
  source 1..22: mol_type = other RNA
ttatatgcctagatttcaatct

SEQ ID NO: 155746 - RNA, 22 nt, synthetic construct
  source 1..22: mol_type = other RNA
ttatatggtctaccatgttgtt

SEQ ID NO: 155747 - RNA, 22 nt, synthetic construct
  source 1..22: mol_type = other RNA
ttatatgttgatgtaatggatc

SEQ ID NO: 155748 - RNA, 22 nt, synthetic construct
  source 1..22: mol_type = other RNA
ttatattaattctgaggcctcc

SEQ ID NO: 155749 - RNA, 22 nt, synthetic construct
  source 1..22: mol_type = other RNA
ttatattatgtgcaagttctct

SEQ ID NO: 155750 - RNA, 22 nt, synthetic construct
  source 1..22: mol_type = other RNA
ttatattctaagtttgccaaag

SEQ ID NO: 155751 - RNA, 22 nt, synthetic construct
  source 1..22: mol_type = other RNA
ttatatttactagatcaagccc

SEQ ID NO: 155752 - RNA, 22 nt, synthetic construct
  source 1..22: mol_type = other RNA
ttatatttccgatgataccttc

SEQ ID NO: 155753 - RNA, 22 nt, synthetic construct
  source 1..22: mol_type = other RNA
ttatatttccgtatccagtggt

SEQ ID NO: 155754 - RNA, 22 nt, synthetic construct
  source 1..22: mol_type = other RNA
ttatattttggtagagatgggg

SEQ ID NO: 155755 - RNA, 22 nt, synthetic construct
  source 1..22: mol_type = other RNA
ttatcaaaatcaaggtgcggga

SEQ ID NO: 155756 - RNA, 22 nt, synthetic construct
  source 1..22: mol_type = other RNA
ttatcaatagcagtgctgaaag

SEQ ID NO: 155757 - RNA, 22 nt, synthetic construct
  source 1..22: mol_type = other RNA
ttatcaattagttcctcctttt

SEQ ID NO: 155758 - RNA, 22 nt, synthetic construct
  source 1..22: mol_type = other RNA
ttatcacacctaggcctatttt

SEQ ID NO: 155759 - RNA, 22 nt, synthetic construct
  source 1..22: mol_type = other RNA
ttatcaccatgtgcttatcaat

SEQ ID NO: 155760 - RNA, 22 nt, synthetic construct
  source 1..22: mol_type = other RNA
ttatcacccttataaaatgagg

SEQ ID NO: 155761 - RNA, 22 nt, synthetic construct
  source 1..22: mol_type = other RNA
ttatcagatcccaattacttcc

SEQ ID NO: 155762 - RNA, 22 nt, synthetic construct
  source 1..22: mol_type = other RNA
ttatcagatggtgatacctctt

SEQ ID NO: 155763 - RNA, 22 nt, synthetic construct
  source 1..22: mol_type = other RNA
ttatcagcaccaaagattatgt

SEQ ID NO: 155764 - RNA, 22 nt, synthetic construct
  source 1..22: mol_type = other RNA
ttatcaggaaagtgccagccac

SEQ ID NO: 155765 - RNA, 22 nt, synthetic construct
  source 1..22: mol_type = other RNA
ttatcaggcttgagtctgtgct

SEQ ID NO: 155766 - RNA, 22 nt, synthetic construct
  source 1..22: mol_type = other RNA
ttatcagggatattggcttata

SEQ ID NO: 155767 - RNA, 22 nt, synthetic construct
  source 1..22: mol_type = other RNA
ttatcagtctccaatcctcagc

SEQ ID NO: 155768 - RNA, 22 nt, synthetic construct
  source 1..22: mol_type = other RNA
ttatcatgtcttcttggatttt

SEQ ID NO: 155769 - RNA, 22 nt, synthetic construct
  source 1..22: mol_type = other RNA
ttatccaattttttggcataca

SEQ ID NO: 155770 - RNA, 22 nt, synthetic construct
  source 1..22: mol_type = other RNA
ttatccattcatctctcgatgg

SEQ ID NO: 155771 - RNA, 22 nt, synthetic construct
  source 1..22: mol_type = other RNA
ttatcccagacagatatatgca

SEQ ID NO: 155772 - RNA, 22 nt, synthetic construct
  source 1..22: mol_type = other RNA
ttatcccagatctaacaaacgc

SEQ ID NO: 155773 - RNA, 22 nt, synthetic construct
  source 1..22: mol_type = other RNA
ttatccctacctaaaaagggag

SEQ ID NO: 155774 - RNA, 22 nt, synthetic construct
  source 1..22: mol_type = other RNA
ttatccctttaaaatgatagca

SEQ ID NO: 155775 - RNA, 22 nt, synthetic construct
  source 1..22: mol_type = other RNA
ttatccgataaagggtctggta

SEQ ID NO: 155776 - RNA, 22 nt, synthetic construct
  source 1..22: mol_type = other RNA
ttatcctatcagagcatgtccc

SEQ ID NO: 155777 - RNA, 22 nt, synthetic construct
  source 1..22: mol_type = other RNA
ttatcctcttctgaagaggctt

SEQ ID NO: 155778 - RNA, 22 nt, synthetic construct
  source 1..22: mol_type = other RNA
ttatccttgcaccaactccaca

SEQ ID NO: 155779 - RNA, 22 nt, synthetic construct
  source 1..22: mol_type = other RNA
ttatcggataaggaagagttta

SEQ ID NO: 155780 - RNA, 22 nt, synthetic construct
  source 1..22: mol_type = other RNA
ttatctacagaggattttggat

SEQ ID NO: 155781 - RNA, 22 nt, synthetic construct
  source 1..22: mol_type = other RNA
ttatctaggcgaaatatctccc

SEQ ID NO: 155782 - RNA, 22 nt, synthetic construct
  source 1..22: mol_type = other RNA
ttatctcattaaaaatcaaccc

SEQ ID NO: 155783 - RNA, 22 nt, synthetic construct
  source 1..22: mol_type = other RNA
ttatctccacatttctacacaa

SEQ ID NO: 155784 - RNA, 22 nt, synthetic construct
  source 1..22: mol_type = other RNA
ttatctccataagtccctaaca

SEQ ID NO: 155785 - RNA, 22 nt, synthetic construct
  source 1..22: mol_type = other RNA
ttatctctctcaagcaatctga

SEQ ID NO: 155786 - RNA, 22 nt, synthetic construct
  source 1..22: mol_type = other RNA
ttatctctgccctcattgaagc

SEQ ID NO: 155787 - RNA, 22 nt, synthetic construct
  source 1..22: mol_type = other RNA
ttatctcttagacctcctagat

SEQ ID NO: 155788 - RNA, 22 nt, synthetic construct
  source 1..22: mol_type = other RNA
ttatctgctgtcggttttctag

SEQ ID NO: 155789 - RNA, 22 nt, synthetic construct
  source 1..22: mol_type = other RNA
ttatctggatttttgtgtagag

SEQ ID NO: 155790 - RNA, 22 nt, synthetic construct
  source 1..22: mol_type = other RNA
ttatctgggaacagcccctagc

SEQ ID NO: 155791 - RNA, 22 nt, synthetic construct
  source 1..22: mol_type = other RNA
ttatctgtgggttaaaagttag

SEQ ID NO: 155792 - RNA, 22 nt, synthetic construct
  source 1..22: mol_type = other RNA
ttatcttaataacctcaaagtg

SEQ ID NO: 155793 - RNA, 22 nt, synthetic construct
  source 1..22: mol_type = other RNA
ttatctttctagattcatatgc

SEQ ID NO: 155794 - RNA, 22 nt, synthetic construct
  source 1..22: mol_type = other RNA
ttatctttggatatccccattt

SEQ ID NO: 155795 - RNA, 22 nt, synthetic construct
  source 1..22: mol_type = other RNA
ttatcttttcaaaaacccaact

SEQ ID NO: 155796 - RNA, 22 nt, synthetic construct
  source 1..22: mol_type = other RNA
ttatgaaccattgtaaaccata

SEQ ID NO: 155797 - RNA, 22 nt, synthetic construct
  source 1..22: mol_type = other RNA
ttatgaagcttttctcctaagt

SEQ ID NO: 155798 - RNA, 22 nt, synthetic construct
  source 1..22: mol_type = other RNA
ttatgaatgatgccatcacatt

SEQ ID NO: 155799 - RNA, 22 nt, synthetic construct
  source 1..22: mol_type = other RNA
ttatgacaagactacctaaaac

SEQ ID NO: 155800 - RNA, 22 nt, synthetic construct
  source 1..22: mol_type = other RNA
ttatgactgagatacttaagtt

SEQ ID NO: 155801 - RNA, 22 nt, synthetic construct
  source 1..22: mol_type = other RNA
ttatgagacacacgagtattca

SEQ ID NO: 155802 - RNA, 22 nt, synthetic construct
  source 1..22: mol_type = other RNA
ttatgagcagttgtatgccaaa

SEQ ID NO: 155803 - RNA, 22 nt, synthetic construct
  source 1..22: mol_type = other RNA
ttatgagcattccccacatagg

SEQ ID NO: 155804 - RNA, 22 nt, synthetic construct
  source 1..22: mol_type = other RNA
ttatgataaaaataacgggccg

SEQ ID NO: 155805 - RNA, 22 nt, synthetic construct
  source 1..22: mol_type = other RNA
ttatgatcttgggaatactttc

SEQ ID NO: 155806 - RNA, 22 nt, synthetic construct
  source 1..22: mol_type = other RNA
ttatgatttcacttacttgagc

SEQ ID NO: 155807 - RNA, 22 nt, synthetic construct
  source 1..22: mol_type = other RNA
ttatgcaagatggcaagtttcc

SEQ ID NO: 155808 - RNA, 22 nt, synthetic construct
  source 1..22: mol_type = other RNA
ttatgcaagatgtcaacattaa

SEQ ID NO: 155809 - RNA, 22 nt, synthetic construct
  source 1..22: mol_type = other RNA
ttatgcatcttgcaaaacggaa

SEQ ID NO: 155810 - RNA, 22 nt, synthetic construct
  source 1..22: mol_type = other RNA
ttatgcatttggtctcattcac

SEQ ID NO: 155811 - RNA, 22 nt, synthetic construct
  source 1..22: mol_type = other RNA
ttatgccaatatcacactgttt

SEQ ID NO: 155812 - RNA, 22 nt, synthetic construct
  source 1..22: mol_type = other RNA
ttatgccccctcttctctcctt

SEQ ID NO: 155813 - RNA, 22 nt, synthetic construct
  source 1..22: mol_type = other RNA
ttatgctaacatgaactactca

SEQ ID NO: 155814 - RNA, 22 nt, synthetic construct
  source 1..22: mol_type = other RNA
ttatgctattataaatggcatc

SEQ ID NO: 155815 - RNA, 22 nt, synthetic construct
  source 1..22: mol_type = other RNA
ttatgctgagtgaatggggtaa

SEQ ID NO: 155816 - RNA, 22 nt, synthetic construct
  source 1..22: mol_type = other RNA
ttatgctgatgaactacacaga

SEQ ID NO: 155817 - RNA, 22 nt, synthetic construct
  source 1..22: mol_type = other RNA
ttatgctggtgggctttgagaa

SEQ ID NO: 155818 - RNA, 22 nt, synthetic construct
  source 1..22: mol_type = other RNA
ttatgctttgtctctggaaggc

SEQ ID NO: 155819 - RNA, 22 nt, synthetic construct
  source 1..22: mol_type = other RNA
ttatggaaacatggtaatttgt

SEQ ID NO: 155820 - RNA, 22 nt, synthetic construct
  source 1..22: mol_type = other RNA
ttatggaataatggaactaaga

SEQ ID NO: 155821 - RNA, 22 nt, synthetic construct
  source 1..22: mol_type = other RNA
ttatggaattgccatatgtagg

SEQ ID NO: 155822 - RNA, 22 nt, synthetic construct
  source 1..22: mol_type = other RNA
ttatggagataaattacccaaa

SEQ ID NO: 155823 - RNA, 22 nt, synthetic construct
  source 1..22: mol_type = other RNA
ttatggatatctggcctgcacc

SEQ ID NO: 155824 - RNA, 22 nt, synthetic construct
  source 1..22: mol_type = other RNA
ttatggcctaagatggaaagtg

SEQ ID NO: 155825 - RNA, 22 nt, synthetic construct
  source 1..22: mol_type = other RNA
ttatggctagaaacttggattg

SEQ ID NO: 155826 - RNA, 22 nt, synthetic construct
  source 1..22: mol_type = other RNA
ttatggctataaccacgagtaa

SEQ ID NO: 155827 - RNA, 22 nt, synthetic construct
  source 1..22: mol_type = other RNA
ttatgggtcaaccactaaggtc

SEQ ID NO: 155828 - RNA, 22 nt, synthetic construct
  source 1..22: mol_type = other RNA
ttatggtaactcctgttctttg

SEQ ID NO: 155829 - RNA, 22 nt, synthetic construct
  source 1..22: mol_type = other RNA
ttatggtaattggttcgtttga

SEQ ID NO: 155830 - RNA, 22 nt, synthetic construct
  source 1..22: mol_type = other RNA
ttatggtaggtgctttttgtat

SEQ ID NO: 155831 - RNA, 22 nt, synthetic construct
  source 1..22: mol_type = other RNA
ttatggtctttttccaggacca

SEQ ID NO: 155832 - RNA, 22 nt, synthetic construct
  source 1..22: mol_type = other RNA
ttatggttgttggctaaaagac

SEQ ID NO: 155833 - RNA, 22 nt, synthetic construct
  source 1..22: mol_type = other RNA
ttatggttttttcccccctgga

SEQ ID NO: 155834 - RNA, 22 nt, synthetic construct
  source 1..22: mol_type = other RNA
ttatgtacacgtcttgtcaata

SEQ ID NO: 155835 - RNA, 22 nt, synthetic construct
  source 1..22: mol_type = other RNA
ttatgtacatgacctatctatt

SEQ ID NO: 155836 - RNA, 22 nt, synthetic construct
  source 1..22: mol_type = other RNA
ttatgtagctgggatggctgaa

SEQ ID NO: 155837 - RNA, 22 nt, synthetic construct
  source 1..22: mol_type = other RNA
ttatgtcagtcaacacactagc

SEQ ID NO: 155838 - RNA, 22 nt, synthetic construct
  source 1..22: mol_type = other RNA
ttatgtccagcccccagttttg

SEQ ID NO: 155839 - RNA, 22 nt, synthetic construct
  source 1..22: mol_type = other RNA
ttatgtcttgtggctgacatgt

SEQ ID NO: 155840 - RNA, 22 nt, synthetic construct
  source 1..22: mol_type = other RNA
ttatgtgaaagtagaggactgc

SEQ ID NO: 155841 - RNA, 22 nt, synthetic construct
  source 1..22: mol_type = other RNA
ttatgtgcaagttctctttttt

SEQ ID NO: 155842 - RNA, 22 nt, synthetic construct
  source 1..22: mol_type = other RNA
ttatgtgcagtctaaccattaa

SEQ ID NO: 155843 - RNA, 22 nt, synthetic construct
  source 1..22: mol_type = other RNA
ttatgtgctttctcaacactgt

SEQ ID NO: 155844 - RNA, 22 nt, synthetic construct
  source 1..22: mol_type = other RNA
ttatgtggaaaaatataggaac

SEQ ID NO: 155845 - RNA, 22 nt, synthetic construct
  source 1..22: mol_type = other RNA
ttatgtgtgtataacccgtttt

SEQ ID NO: 155846 - RNA, 22 nt, synthetic construct
  source 1..22: mol_type = other RNA
ttatgttataatgagatagacc

SEQ ID NO: 155847 - RNA, 22 nt, synthetic construct
  source 1..22: mol_type = other RNA
ttatgttcatgaaccttcacca

SEQ ID NO: 155848 - RNA, 22 nt, synthetic construct
  source 1..22: mol_type = other RNA
ttatgttccacatgttactcat

SEQ ID NO: 155849 - RNA, 22 nt, synthetic construct
  source 1..22: mol_type = other RNA
ttatgttgcacaaaagtgaaaa

SEQ ID NO: 155850 - RNA, 22 nt, synthetic construct
  source 1..22: mol_type = other RNA
ttattaaaatgaacctgctttc

SEQ ID NO: 155851 - RNA, 22 nt, synthetic construct
  source 1..22: mol_type = other RNA
ttattaaacctgttacatggtt

SEQ ID NO: 155852 - RNA, 22 nt, synthetic construct
  source 1..22: mol_type = other RNA
ttattaaagtagaaggccctat

SEQ ID NO: 155853 - RNA, 22 nt, synthetic construct
  source 1..22: mol_type = other RNA
ttattaaatgagacacctacaa

SEQ ID NO: 155854 - RNA, 22 nt, synthetic construct
  source 1..22: mol_type = other RNA
ttattaacataccgacggctca

SEQ ID NO: 155855 - RNA, 22 nt, synthetic construct
  source 1..22: mol_type = other RNA
ttattaagagtgtgctgactag

SEQ ID NO: 155856 - RNA, 22 nt, synthetic construct
  source 1..22: mol_type = other RNA
ttattaagataatgctgttctc

SEQ ID NO: 155857 - RNA, 22 nt, synthetic construct
  source 1..22: mol_type = other RNA
ttattaagcaaaatggaagtgc

SEQ ID NO: 155858 - RNA, 22 nt, synthetic construct
  source 1..22: mol_type = other RNA
ttattaatgtgttgtctgattc

SEQ ID NO: 155859 - RNA, 22 nt, synthetic construct
  source 1..22: mol_type = other RNA
ttattaatttggcttggggaac

SEQ ID NO: 155860 - RNA, 22 nt, synthetic construct
  source 1..22: mol_type = other RNA
ttattagaactagaactgtgtt

SEQ ID NO: 155861 - RNA, 22 nt, synthetic construct
  source 1..22: mol_type = other RNA
ttattagatagtggtttgaagc

SEQ ID NO: 155862 - RNA, 22 nt, synthetic construct
  source 1..22: mol_type = other RNA
ttattagcaaagaggcaaaact

SEQ ID NO: 155863 - RNA, 22 nt, synthetic construct
  source 1..22: mol_type = other RNA
ttattagcttgctagtagcaga

SEQ ID NO: 155864 - RNA, 22 nt, synthetic construct
  source 1..22: mol_type = other RNA
ttattagggtaatgctggcttc

SEQ ID NO: 155865 - RNA, 22 nt, synthetic construct
  source 1..22: mol_type = other RNA
ttattaggtgcacacaacactc

SEQ ID NO: 155866 - RNA, 22 nt, synthetic construct
  source 1..22: mol_type = other RNA
ttattagtagttaggtggtttg

SEQ ID NO: 155867 - RNA, 22 nt, synthetic construct
  source 1..22: mol_type = other RNA
ttattagttgtacttgacacaa

SEQ ID NO: 155868 - RNA, 22 nt, synthetic construct
  source 1..22: mol_type = other RNA
ttattcaaaacaaaacacatgg

SEQ ID NO: 155869 - RNA, 22 nt, synthetic construct
  source 1..22: mol_type = other RNA
ttattcaaataattgctgcagt

SEQ ID NO: 155870 - RNA, 22 nt, synthetic construct
  source 1..22: mol_type = other RNA
ttattcacccaagaatttcatg

SEQ ID NO: 155871 - RNA, 22 nt, synthetic construct
  source 1..22: mol_type = other RNA
ttattcattctttttactcgag

SEQ ID NO: 155872 - RNA, 22 nt, synthetic construct
  source 1..22: mol_type = other RNA
ttattccataaaaaccaaacac

SEQ ID NO: 155873 - RNA, 22 nt, synthetic construct
  source 1..22: mol_type = other RNA
ttattccccagggaaaccttac

SEQ ID NO: 155874 - RNA, 22 nt, synthetic construct
  source 1..22: mol_type = other RNA
ttattcctctcttggaatgtgc

SEQ ID NO: 155875 - RNA, 22 nt, synthetic construct
  source 1..22: mol_type = other RNA
ttattctaaacacacgggctgg

SEQ ID NO: 155876 - RNA, 22 nt, synthetic construct
  source 1..22: mol_type = other RNA
ttattctgttctagctcctggg

SEQ ID NO: 155877 - RNA, 22 nt, synthetic construct
  source 1..22: mol_type = other RNA
ttattcttacagtgacatatgc

SEQ ID NO: 155878 - RNA, 22 nt, synthetic construct
  source 1..22: mol_type = other RNA
ttattcttcagcaaggaccatt

SEQ ID NO: 155879 - RNA, 22 nt, synthetic construct
  source 1..22: mol_type = other RNA
ttattcttgttttcttgagatg

SEQ ID NO: 155880 - RNA, 22 nt, synthetic construct
  source 1..22: mol_type = other RNA
ttattcttttagagtaactgtc

SEQ ID NO: 155881 - RNA, 22 nt, synthetic construct
  source 1..22: mol_type = other RNA
ttattctttttctagtttgagg

SEQ ID NO: 155882 - RNA, 22 nt, synthetic construct
  source 1..22: mol_type = other RNA
ttattgacaagacgtgtacata

SEQ ID NO: 155883 - RNA, 22 nt, synthetic construct
  source 1..22: mol_type = other RNA
ttattgagaagcagaaaatcag

SEQ ID NO: 155884 - RNA, 22 nt, synthetic construct
  source 1..22: mol_type = other RNA
ttattgagtctgtagggtgact

SEQ ID NO: 155885 - RNA, 22 nt, synthetic construct
  source 1..22: mol_type = other RNA
ttattgataagcacatggtgat

SEQ ID NO: 155886 - RNA, 22 nt, synthetic construct
  source 1..22: mol_type = other RNA
ttattgattcagatgacagaaa

SEQ ID NO: 155887 - RNA, 22 nt, synthetic construct
  source 1..22: mol_type = other RNA
ttattgattggcaaatctttag

SEQ ID NO: 155888 - RNA, 22 nt, synthetic construct
  source 1..22: mol_type = other RNA
ttattgcatagggatgttgcct

SEQ ID NO: 155889 - RNA, 22 nt, synthetic construct
  source 1..22: mol_type = other RNA
ttattggaaaactctgtttcct

SEQ ID NO: 155890 - RNA, 22 nt, synthetic construct
  source 1..22: mol_type = other RNA
ttattgtcaaggtcatcctttc

SEQ ID NO: 155891 - RNA, 22 nt, synthetic construct
  source 1..22: mol_type = other RNA
ttattgtctgcaagcagatctg

SEQ ID NO: 155892 - RNA, 22 nt, synthetic construct
  source 1..22: mol_type = other RNA
ttattgtttcacttttctggtt

SEQ ID NO: 155893 - RNA, 22 nt, synthetic construct
  source 1..22: mol_type = other RNA
ttatttaatctctcttgacctt

SEQ ID NO: 155894 - RNA, 22 nt, synthetic construct
  source 1..22: mol_type = other RNA
ttatttaatgtgctgtccattt

SEQ ID NO: 155895 - RNA, 22 nt, synthetic construct
  source 1..22: mol_type = other RNA
ttatttagcccatgtctaaagt

SEQ ID NO: 155896 - RNA, 22 nt, synthetic construct
  source 1..22: mol_type = other RNA
ttatttaggccctctataattc

SEQ ID NO: 155897 - RNA, 22 nt, synthetic construct
  source 1..22: mol_type = other RNA
ttatttagtgaaatagttggtc

SEQ ID NO: 155898 - RNA, 22 nt, synthetic construct
  source 1..22: mol_type = other RNA
ttatttatacaggtgcttacag

SEQ ID NO: 155899 - RNA, 22 nt, synthetic construct
  source 1..22: mol_type = other RNA
ttatttatgctgatgaactaca

SEQ ID NO: 155900 - RNA, 22 nt, synthetic construct
  source 1..22: mol_type = other RNA
ttatttccagcctttaatttag

SEQ ID NO: 155901 - RNA, 22 nt, synthetic construct
  source 1..22: mol_type = other RNA
ttatttccagggggtatggaga

SEQ ID NO: 155902 - RNA, 22 nt, synthetic construct
  source 1..22: mol_type = other RNA
ttatttccttaagccatttcag

SEQ ID NO: 155903 - RNA, 22 nt, synthetic construct
  source 1..22: mol_type = other RNA
ttatttccttccagtttatatg

SEQ ID NO: 155904 - RNA, 22 nt, synthetic construct
  source 1..22: mol_type = other RNA
ttatttctgggctctctattcc

SEQ ID NO: 155905 - RNA, 22 nt, synthetic construct
  source 1..22: mol_type = other RNA
ttatttctgtatcttttcagtc

SEQ ID NO: 155906 - RNA, 22 nt, synthetic construct
  source 1..22: mol_type = other RNA
ttatttctgtcatctgaatcaa

SEQ ID NO: 155907 - RNA, 22 nt, synthetic construct
  source 1..22: mol_type = other RNA
ttatttcttctccctcttcgct

SEQ ID NO: 155908 - RNA, 22 nt, synthetic construct
  source 1..22: mol_type = other RNA
ttatttcttgacctcagtggta

SEQ ID NO: 155909 - RNA, 22 nt, synthetic construct
  source 1..22: mol_type = other RNA
ttatttctttttcttgctttgc

SEQ ID NO: 155910 - RNA, 22 nt, synthetic construct
  source 1..22: mol_type = other RNA
ttatttgaataaggtctgtaag

SEQ ID NO: 155911 - RNA, 22 nt, synthetic construct
  source 1..22: mol_type = other RNA
ttatttgagagtaagttgcata

SEQ ID NO: 155912 - RNA, 22 nt, synthetic construct
  source 1..22: mol_type = other RNA
ttatttgcggcttgattagctt

SEQ ID NO: 155913 - RNA, 22 nt, synthetic construct
  source 1..22: mol_type = other RNA
ttatttgctgtcaggcaaggga

SEQ ID NO: 155914 - RNA, 22 nt, synthetic construct
  source 1..22: mol_type = other RNA
ttatttggaaatatggtcactg

SEQ ID NO: 155915 - RNA, 22 nt, synthetic construct
  source 1..22: mol_type = other RNA
ttatttggaagagagaaggctg

SEQ ID NO: 155916 - RNA, 22 nt, synthetic construct
  source 1..22: mol_type = other RNA
ttatttggctgttaccatttga

SEQ ID NO: 155917 - RNA, 22 nt, synthetic construct
  source 1..22: mol_type = other RNA
ttatttggggattctgctacta

SEQ ID NO: 155918 - RNA, 22 nt, synthetic construct
  source 1..22: mol_type = other RNA
ttatttgtgcatactgtgatga

SEQ ID NO: 155919 - RNA, 22 nt, synthetic construct
  source 1..22: mol_type = other RNA
ttatttgttactgatctgctca

SEQ ID NO: 155920 - RNA, 22 nt, synthetic construct
  source 1..22: mol_type = other RNA
ttatttgttctgtcacggtgcc

SEQ ID NO: 155921 - RNA, 22 nt, synthetic construct
  source 1..22: mol_type = other RNA
ttattttaatcgaatcctcaca

SEQ ID NO: 155922 - RNA, 22 nt, synthetic construct
  source 1..22: mol_type = other RNA
ttattttatgtacacgtcttgt

SEQ ID NO: 155923 - RNA, 22 nt, synthetic construct
  source 1..22: mol_type = other RNA
ttattttcatggttttaatggg

SEQ ID NO: 155924 - RNA, 22 nt, synthetic construct
  source 1..22: mol_type = other RNA
ttattttcctccttctgctcac

SEQ ID NO: 155925 - RNA, 22 nt, synthetic construct
  source 1..22: mol_type = other RNA
ttattttctgcatttggtttgc

SEQ ID NO: 155926 - RNA, 22 nt, synthetic construct
  source 1..22: mol_type = other RNA
ttatttttacccaacatgagag

SEQ ID NO: 155927 - RNA, 22 nt, synthetic construct
  source 1..22: mol_type = other RNA
ttatttttacccgtggaaatac

SEQ ID NO: 155928 - RNA, 22 nt, synthetic construct
  source 1..22: mol_type = other RNA
ttatttttgagacaggttgttg

SEQ ID NO: 155929 - RNA, 22 nt, synthetic construct
  source 1..22: mol_type = other RNA
ttattttttcccagatacgtta

SEQ ID NO: 155930 - RNA, 22 nt, synthetic construct
  source 1..22: mol_type = other RNA
ttattttttcccgctacacaag

SEQ ID NO: 155931 - RNA, 22 nt, synthetic construct
  source 1..22: mol_type = other RNA
ttattttttcttcccatctcac

SEQ ID NO: 155932 - RNA, 22 nt, synthetic construct
  source 1..22: mol_type = other RNA
ttcaaaaacagcatatacatga

SEQ ID NO: 155933 - RNA, 22 nt, synthetic construct
  source 1..22: mol_type = other RNA
ttcaaaaacccaactctttctt

SEQ ID NO: 155934 - RNA, 22 nt, synthetic construct
  source 1..22: mol_type = other RNA
ttcaaaacaaaacacatggcat

SEQ ID NO: 155935 - RNA, 22 nt, synthetic construct
  source 1..22: mol_type = other RNA
ttcaaaacatcatctaatttcc

SEQ ID NO: 155936 - RNA, 22 nt, synthetic construct
  source 1..22: mol_type = other RNA
ttcaaaagacatcactaagagt

SEQ ID NO: 155937 - RNA, 22 nt, synthetic construct
  source 1..22: mol_type = other RNA
ttcaaaagccccaaaccatcaa

SEQ ID NO: 155938 - RNA, 22 nt, synthetic construct
  source 1..22: mol_type = other RNA
ttcaaaagctccccggatgatt

SEQ ID NO: 155939 - RNA, 22 nt, synthetic construct
  source 1..22: mol_type = other RNA
ttcaaaatctgatgtgtatgtt

SEQ ID NO: 155940 - RNA, 22 nt, synthetic construct
  source 1..22: mol_type = other RNA
ttcaaaatgtgatggcatcatt

SEQ ID NO: 155941 - RNA, 22 nt, synthetic construct
  source 1..22: mol_type = other RNA
ttcaaacatgacagatcccaaa

SEQ ID NO: 155942 - RNA, 22 nt, synthetic construct
  source 1..22: mol_type = other RNA
ttcaaaccaatgttctcttttc

SEQ ID NO: 155943 - RNA, 22 nt, synthetic construct
  source 1..22: mol_type = other RNA
ttcaaaccacctaactactaat

SEQ ID NO: 155944 - RNA, 22 nt, synthetic construct
  source 1..22: mol_type = other RNA
ttcaaactgtggtcactgtttg

SEQ ID NO: 155945 - RNA, 22 nt, synthetic construct
  source 1..22: mol_type = other RNA
ttcaaagaaactacctagaaaa

SEQ ID NO: 155946 - RNA, 22 nt, synthetic construct
  source 1..22: mol_type = other RNA
ttcaaagagaacaaaatacctg

SEQ ID NO: 155947 - RNA, 22 nt, synthetic construct
  source 1..22: mol_type = other RNA
ttcaaagagacctgattcttcc

SEQ ID NO: 155948 - RNA, 22 nt, synthetic construct
  source 1..22: mol_type = other RNA
ttcaaagatcatttcacttgat

SEQ ID NO: 155949 - RNA, 22 nt, synthetic construct
  source 1..22: mol_type = other RNA
ttcaaagcaagttaaaagacat

SEQ ID NO: 155950 - RNA, 22 nt, synthetic construct
  source 1..22: mol_type = other RNA
ttcaaagggtcactattaacca

SEQ ID NO: 155951 - RNA, 22 nt, synthetic construct
  source 1..22: mol_type = other RNA
ttcaaagttaatagcctcctaa

SEQ ID NO: 155952 - RNA, 22 nt, synthetic construct
  source 1..22: mol_type = other RNA
ttcaaataattgctgcagtttt

SEQ ID NO: 155953 - RNA, 22 nt, synthetic construct
  source 1..22: mol_type = other RNA
ttcaaatacctagttttccaat

SEQ ID NO: 155954 - RNA, 22 nt, synthetic construct
  source 1..22: mol_type = other RNA
ttcaaatgaggcttttattggt

SEQ ID NO: 155955 - RNA, 22 nt, synthetic construct
  source 1..22: mol_type = other RNA
ttcaaatgctataaagaacatg

SEQ ID NO: 155956 - RNA, 22 nt, synthetic construct
  source 1..22: mol_type = other RNA
ttcaaatgtgacagaacaaact

SEQ ID NO: 155957 - RNA, 22 nt, synthetic construct
  source 1..22: mol_type = other RNA
ttcaaatgttaagcccaacttc

SEQ ID NO: 155958 - RNA, 22 nt, synthetic construct
  source 1..22: mol_type = other RNA
ttcaacaaaactgggggctgga

SEQ ID NO: 155959 - RNA, 22 nt, synthetic construct
  source 1..22: mol_type = other RNA
ttcaacaaaggttgaaaactca

SEQ ID NO: 155960 - RNA, 22 nt, synthetic construct
  source 1..22: mol_type = other RNA
ttcaacaatagcaacaaaacaa

SEQ ID NO: 155961 - RNA, 22 nt, synthetic construct
  source 1..22: mol_type = other RNA
ttcaacagctactatgaatata

SEQ ID NO: 155962 - RNA, 22 nt, synthetic construct
  source 1..22: mol_type = other RNA
ttcaacaggtataaagtttccg

SEQ ID NO: 155963 - RNA, 22 nt, synthetic construct
  source 1..22: mol_type = other RNA
ttcaaccatacttttcaactga

SEQ ID NO: 155964 - RNA, 22 nt, synthetic construct
  source 1..22: mol_type = other RNA
ttcaaccctcggcctctactga

SEQ ID NO: 155965 - RNA, 22 nt, synthetic construct
  source 1..22: mol_type = other RNA
ttcaacctaacatgtcttggtg

SEQ ID NO: 155966 - RNA, 22 nt, synthetic construct
  source 1..22: mol_type = other RNA
ttcaacctataagacccagtgg

SEQ ID NO: 155967 - RNA, 22 nt, synthetic construct
  source 1..22: mol_type = other RNA
ttcaacctcaactttaggttac

SEQ ID NO: 155968 - RNA, 22 nt, synthetic construct
  source 1..22: mol_type = other RNA
ttcaacctcctgggctcaaatg

SEQ ID NO: 155969 - RNA, 22 nt, synthetic construct
  source 1..22: mol_type = other RNA
ttcaacctttgttgaaaacgag

SEQ ID NO: 155970 - RNA, 22 nt, synthetic construct
  source 1..22: mol_type = other RNA
ttcaacggacatttttccaaag

SEQ ID NO: 155971 - RNA, 22 nt, synthetic construct
  source 1..22: mol_type = other RNA
ttcaactgaacaacgctgtggc

SEQ ID NO: 155972 - RNA, 22 nt, synthetic construct
  source 1..22: mol_type = other RNA
ttcaacttggtaaaaagtgctt

SEQ ID NO: 155973 - RNA, 22 nt, synthetic construct
  source 1..22: mol_type = other RNA
ttcaagaaaccacagagcctaa

SEQ ID NO: 155974 - RNA, 22 nt, synthetic construct
  source 1..22: mol_type = other RNA
ttcaagacaagcaaggaagggc

SEQ ID NO: 155975 - RNA, 22 nt, synthetic construct
  source 1..22: mol_type = other RNA
ttcaagaggttaaaaccacaaa

SEQ ID NO: 155976 - RNA, 22 nt, synthetic construct
  source 1..22: mol_type = other RNA
ttcaagatactgcactaaacta

SEQ ID NO: 155977 - RNA, 22 nt, synthetic construct
  source 1..22: mol_type = other RNA
ttcaagatgcataccaagcccg

SEQ ID NO: 155978 - RNA, 22 nt, synthetic construct
  source 1..22: mol_type = other RNA
ttcaagatttcataggcatctc

SEQ ID NO: 155979 - RNA, 22 nt, synthetic construct
  source 1..22: mol_type = other RNA
ttcaagcaccacttcgagaagg

SEQ ID NO: 155980 - RNA, 22 nt, synthetic construct
  source 1..22: mol_type = other RNA
ttcaagcagaaatgagttccag

SEQ ID NO: 155981 - RNA, 22 nt, synthetic construct
  source 1..22: mol_type = other RNA
ttcaagcattgggagctttcat

SEQ ID NO: 155982 - RNA, 22 nt, synthetic construct
  source 1..22: mol_type = other RNA
ttcaagccccagttctgcgcaa

SEQ ID NO: 155983 - RNA, 22 nt, synthetic construct
  source 1..22: mol_type = other RNA
ttcaagcgctgaagtacttcaa

SEQ ID NO: 155984 - RNA, 22 nt, synthetic construct
  source 1..22: mol_type = other RNA
ttcaaggcttgtgcatcagaat

SEQ ID NO: 155985 - RNA, 22 nt, synthetic construct
  source 1..22: mol_type = other RNA
ttcaaggggccttttgtcaagc

SEQ ID NO: 155986 - RNA, 22 nt, synthetic construct
  source 1..22: mol_type = other RNA
ttcaagggtgttttccccccta

SEQ ID NO: 155987 - RNA, 22 nt, synthetic construct
  source 1..22: mol_type = other RNA
ttcaaggtaatctagtttatct

SEQ ID NO: 155988 - RNA, 22 nt, synthetic construct
  source 1..22: mol_type = other RNA
ttcaaggtagaagtacaaacat

SEQ ID NO: 155989 - RNA, 22 nt, synthetic construct
  source 1..22: mol_type = other RNA
ttcaaggtatctccccaaagat

SEQ ID NO: 155990 - RNA, 22 nt, synthetic construct
  source 1..22: mol_type = other RNA
ttcaaggtgttagcaggactgg

SEQ ID NO: 155991 - RNA, 22 nt, synthetic construct
  source 1..22: mol_type = other RNA
ttcaaggtgttcctgaagtctt

SEQ ID NO: 155992 - RNA, 22 nt, synthetic construct
  source 1..22: mol_type = other RNA
ttcaaggttataatcagccgtg

SEQ ID NO: 155993 - RNA, 22 nt, synthetic construct
  source 1..22: mol_type = other RNA
ttcaaggttcacaaattagaac

SEQ ID NO: 155994 - RNA, 22 nt, synthetic construct
  source 1..22: mol_type = other RNA
ttcaagtaacactcagaagtac

SEQ ID NO: 155995 - RNA, 22 nt, synthetic construct
  source 1..22: mol_type = other RNA
ttcaagtatttccacgggtaaa

SEQ ID NO: 155996 - RNA, 22 nt, synthetic construct
  source 1..22: mol_type = other RNA
ttcaagtgaaccaaaaaccaca

SEQ ID NO: 155997 - RNA, 22 nt, synthetic construct
  source 1..22: mol_type = other RNA
ttcaagttacaataatatgcct

SEQ ID NO: 155998 - RNA, 22 nt, synthetic construct
  source 1..22: mol_type = other RNA
ttcaagttgctttttcttcttg

SEQ ID NO: 155999 - RNA, 22 nt, synthetic construct
  source 1..22: mol_type = other RNA
ttcaagtttcaccctgcgaagg

SEQ ID NO: 156000 - RNA, 22 nt, synthetic construct
  source 1..22: mol_type = other RNA
ttcaagtttggctcccatgatt

SEQ ID NO: 156001 - RNA, 22 nt, synthetic construct
  source 1..22: mol_type = other RNA
ttcaatactactgcaaatatcc

SEQ ID NO: 156002 - RNA, 22 nt, synthetic construct
  source 1..22: mol_type = other RNA
ttcaatagtgggtagaagcagc

SEQ ID NO: 156003 - RNA, 22 nt, synthetic construct
  source 1..22: mol_type = other RNA
ttcaatatgcagtatgtgccat

SEQ ID NO: 156004 - RNA, 22 nt, synthetic construct
  source 1..22: mol_type = other RNA
ttcaatattaagagtctcatct

SEQ ID NO: 156005 - RNA, 22 nt, synthetic construct
  source 1..22: mol_type = other RNA
ttcaatattttggaagactatg

SEQ ID NO: 156006 - RNA, 22 nt, synthetic construct
  source 1..22: mol_type = other RNA
ttcaatctggaatgcatcgttt

SEQ ID NO: 156007 - RNA, 22 nt, synthetic construct
  source 1..22: mol_type = other RNA
ttcaatcttggaaatgatacct

SEQ ID NO: 156008 - RNA, 22 nt, synthetic construct
  source 1..22: mol_type = other RNA
ttcaatgagggcagagataact

SEQ ID NO: 156009 - RNA, 22 nt, synthetic construct
  source 1..22: mol_type = other RNA
ttcaatgcaatacttaatagcc

SEQ ID NO: 156010 - RNA, 22 nt, synthetic construct
  source 1..22: mol_type = other RNA
ttcaatgctacagtaagcaaaa

SEQ ID NO: 156011 - RNA, 22 nt, synthetic construct
  source 1..22: mol_type = other RNA
ttcaatgtttggtagatttctg

SEQ ID NO: 156012 - RNA, 22 nt, synthetic construct
  source 1..22: mol_type = other RNA
ttcaattgtcctggcagatcaa

SEQ ID NO: 156013 - RNA, 22 nt, synthetic construct
  source 1..22: mol_type = other RNA
ttcaattttcatgggttgattt

SEQ ID NO: 156014 - RNA, 22 nt, synthetic construct
  source 1..22: mol_type = other RNA
ttcacaaacaaatccttttccc

SEQ ID NO: 156015 - RNA, 22 nt, synthetic construct
  source 1..22: mol_type = other RNA
ttcacaaacacacaaaccaaca

SEQ ID NO: 156016 - RNA, 22 nt, synthetic construct
  source 1..22: mol_type = other RNA
ttcacaaagccctcaggaccag

SEQ ID NO: 156017 - RNA, 22 nt, synthetic construct
  source 1..22: mol_type = other RNA
ttcacaagattaatcttgcaaa

SEQ ID NO: 156018 - RNA, 22 nt, synthetic construct
  source 1..22: mol_type = other RNA
ttcacacaccctttcttaggaa

SEQ ID NO: 156019 - RNA, 22 nt, synthetic construct
  source 1..22: mol_type = other RNA
ttcacacattaactatggacat

SEQ ID NO: 156020 - RNA, 22 nt, synthetic construct
  source 1..22: mol_type = other RNA
ttcacaccatttagatcatctt

SEQ ID NO: 156021 - RNA, 22 nt, synthetic construct
  source 1..22: mol_type = other RNA
ttcacacctgtagtcccagctc

SEQ ID NO: 156022 - RNA, 22 nt, synthetic construct
  source 1..22: mol_type = other RNA
ttcacacgcattgcattgacta

SEQ ID NO: 156023 - RNA, 22 nt, synthetic construct
  source 1..22: mol_type = other RNA
ttcacactagtcaccctacaga

SEQ ID NO: 156024 - RNA, 22 nt, synthetic construct
  source 1..22: mol_type = other RNA
ttcacactataacagatggaac

SEQ ID NO: 156025 - RNA, 22 nt, synthetic construct
  source 1..22: mol_type = other RNA
ttcacactcgcactccacttcc

SEQ ID NO: 156026 - RNA, 22 nt, synthetic construct
  source 1..22: mol_type = other RNA
ttcacactgattttctgcttct

SEQ ID NO: 156027 - RNA, 22 nt, synthetic construct
  source 1..22: mol_type = other RNA
ttcacactgctcctgcctttgt

SEQ ID NO: 156028 - RNA, 22 nt, synthetic construct
  source 1..22: mol_type = other RNA
ttcacacttagttcaagatgca

SEQ ID NO: 156029 - RNA, 22 nt, synthetic construct
  source 1..22: mol_type = other RNA
ttcacagaaacagaaaaatcca

SEQ ID NO: 156030 - RNA, 22 nt, synthetic construct
  source 1..22: mol_type = other RNA
ttcacagaactgtcactgacac

SEQ ID NO: 156031 - RNA, 22 nt, synthetic construct
  source 1..22: mol_type = other RNA
ttcacagaatatactcagaaaa

SEQ ID NO: 156032 - RNA, 22 nt, synthetic construct
  source 1..22: mol_type = other RNA
ttcacagacagtaatttataca

SEQ ID NO: 156033 - RNA, 22 nt, synthetic construct
  source 1..22: mol_type = other RNA
ttcacagcatgaatacctattt

SEQ ID NO: 156034 - RNA, 22 nt, synthetic construct
  source 1..22: mol_type = other RNA
ttcacagcgtgcaccttacatt

SEQ ID NO: 156035 - RNA, 22 nt, synthetic construct
  source 1..22: mol_type = other RNA
ttcacagggcagggagagagaa

SEQ ID NO: 156036 - RNA, 22 nt, synthetic construct
  source 1..22: mol_type = other RNA
ttcacagtagaagactcagcag

SEQ ID NO: 156037 - RNA, 22 nt, synthetic construct
  source 1..22: mol_type = other RNA
ttcacataaatttgccacattt

SEQ ID NO: 156038 - RNA, 22 nt, synthetic construct
  source 1..22: mol_type = other RNA
ttcacataaggtatatttctgt

SEQ ID NO: 156039 - RNA, 22 nt, synthetic construct
  source 1..22: mol_type = other RNA
ttcacatattttatgctttgtc

SEQ ID NO: 156040 - RNA, 22 nt, synthetic construct
  source 1..22: mol_type = other RNA
ttcacattcttcaccattccag

SEQ ID NO: 156041 - RNA, 22 nt, synthetic construct
  source 1..22: mol_type = other RNA
ttcacattgcacagtctccccc

SEQ ID NO: 156042 - RNA, 22 nt, synthetic construct
  source 1..22: mol_type = other RNA
ttcacatttaagaagggaacac

SEQ ID NO: 156043 - RNA, 22 nt, synthetic construct
  source 1..22: mol_type = other RNA
ttcacatttcgccttctcagaa

SEQ ID NO: 156044 - RNA, 22 nt, synthetic construct
  source 1..22: mol_type = other RNA
ttcaccaaacaccttacactca

SEQ ID NO: 156045 - RNA, 22 nt, synthetic construct
  source 1..22: mol_type = other RNA
ttcaccaaagatttactaaact

SEQ ID NO: 156046 - RNA, 22 nt, synthetic construct
  source 1..22: mol_type = other RNA
ttcaccaactgaagcggggctg

SEQ ID NO: 156047 - RNA, 22 nt, synthetic construct
  source 1..22: mol_type = other RNA
ttcaccaattgttaacatttct

SEQ ID NO: 156048 - RNA, 22 nt, synthetic construct
  source 1..22: mol_type = other RNA
ttcaccagcggcatacaggagt

SEQ ID NO: 156049 - RNA, 22 nt, synthetic construct
  source 1..22: mol_type = other RNA
ttcaccagtttctaattagaat

SEQ ID NO: 156050 - RNA, 22 nt, synthetic construct
  source 1..22: mol_type = other RNA
ttcaccattccagccattctct

SEQ ID NO: 156051 - RNA, 22 nt, synthetic construct
  source 1..22: mol_type = other RNA
ttcacccaagaatttcatgcct

SEQ ID NO: 156052 - RNA, 22 nt, synthetic construct
  source 1..22: mol_type = other RNA
ttcaccctgcgaaggcaatgta

SEQ ID NO: 156053 - RNA, 22 nt, synthetic construct
  source 1..22: mol_type = other RNA
ttcaccgtgcaactagagaaag

SEQ ID NO: 156054 - RNA, 22 nt, synthetic construct
  source 1..22: mol_type = other RNA
ttcacctctacacaaaaatcca

SEQ ID NO: 156055 - RNA, 22 nt, synthetic construct
  source 1..22: mol_type = other RNA
ttcacctctccgggtaaaaagc

SEQ ID NO: 156056 - RNA, 22 nt, synthetic construct
  source 1..22: mol_type = other RNA
ttcacgagactgttagggactt

SEQ ID NO: 156057 - RNA, 22 nt, synthetic construct
  source 1..22: mol_type = other RNA
ttcacgatgcttaggtaagaaa

SEQ ID NO: 156058 - RNA, 22 nt, synthetic construct
  source 1..22: mol_type = other RNA
ttcacgcacagggagatacttg

SEQ ID NO: 156059 - RNA, 22 nt, synthetic construct
  source 1..22: mol_type = other RNA
ttcacgtgcattcatactgaag

SEQ ID NO: 156060 - RNA, 22 nt, synthetic construct
  source 1..22: mol_type = other RNA
ttcacgtggcgctccctctgtg

SEQ ID NO: 156061 - RNA, 22 nt, synthetic construct
  source 1..22: mol_type = other RNA
ttcactaatgcctcaaattagt

SEQ ID NO: 156062 - RNA, 22 nt, synthetic construct
  source 1..22: mol_type = other RNA
ttcactagacacatttttgaca

SEQ ID NO: 156063 - RNA, 22 nt, synthetic construct
  source 1..22: mol_type = other RNA
ttcactagatctcttttccttt

SEQ ID NO: 156064 - RNA, 22 nt, synthetic construct
  source 1..22: mol_type = other RNA
ttcactagtgggtcgggtgtca

SEQ ID NO: 156065 - RNA, 22 nt, synthetic construct
  source 1..22: mol_type = other RNA
ttcactcagcataattggttaa

SEQ ID NO: 156066 - RNA, 22 nt, synthetic construct
  source 1..22: mol_type = other RNA
ttcactcctcattcacactagt

SEQ ID NO: 156067 - RNA, 22 nt, synthetic construct
  source 1..22: mol_type = other RNA
ttcactctaatatggttcctag

SEQ ID NO: 156068 - RNA, 22 nt, synthetic construct
  source 1..22: mol_type = other RNA
ttcactctcaatagtgtccttt

SEQ ID NO: 156069 - RNA, 22 nt, synthetic construct
  source 1..22: mol_type = other RNA
ttcactctgtcgcccaggctgg

SEQ ID NO: 156070 - RNA, 22 nt, synthetic construct
  source 1..22: mol_type = other RNA
ttcactcttaaaaggagatata

SEQ ID NO: 156071 - RNA, 22 nt, synthetic construct
  source 1..22: mol_type = other RNA
ttcactcttagtgatgtctttt

SEQ ID NO: 156072 - RNA, 22 nt, synthetic construct
  source 1..22: mol_type = other RNA
ttcactcttctgcaagttgcta

SEQ ID NO: 156073 - RNA, 22 nt, synthetic construct
  source 1..22: mol_type = other RNA
ttcactcttttaaggtttagaa

SEQ ID NO: 156074 - RNA, 22 nt, synthetic construct
  source 1..22: mol_type = other RNA
ttcactgactacacatacacag

SEQ ID NO: 156075 - RNA, 22 nt, synthetic construct
  source 1..22: mol_type = other RNA
ttcactgcagaattactgacaa

SEQ ID NO: 156076 - RNA, 22 nt, synthetic construct
  source 1..22: mol_type = other RNA
ttcactgctcagtccctcacct

SEQ ID NO: 156077 - RNA, 22 nt, synthetic construct
  source 1..22: mol_type = other RNA
ttcactggagaattctactaaa

SEQ ID NO: 156078 - RNA, 22 nt, synthetic construct
  source 1..22: mol_type = other RNA
ttcactgtgactccaaagcaaa

SEQ ID NO: 156079 - RNA, 22 nt, synthetic construct
  source 1..22: mol_type = other RNA
ttcacttacttgagccccagaa

SEQ ID NO: 156080 - RNA, 22 nt, synthetic construct
  source 1..22: mol_type = other RNA
ttcacttccaagtcccggaagc

SEQ ID NO: 156081 - RNA, 22 nt, synthetic construct
  source 1..22: mol_type = other RNA
ttcacttcgttcagtttagtaa

SEQ ID NO: 156082 - RNA, 22 nt, synthetic construct
  source 1..22: mol_type = other RNA
ttcacttctctgctgctgaaaa

SEQ ID NO: 156083 - RNA, 22 nt, synthetic construct
  source 1..22: mol_type = other RNA
ttcacttcttagtaaatatccg

SEQ ID NO: 156084 - RNA, 22 nt, synthetic construct
  source 1..22: mol_type = other RNA
ttcacttcttattggttatctg

SEQ ID NO: 156085 - RNA, 22 nt, synthetic construct
  source 1..22: mol_type = other RNA
ttcacttgaaacctgccatggt

SEQ ID NO: 156086 - RNA, 22 nt, synthetic construct
  source 1..22: mol_type = other RNA
ttcacttgattactttacagtt

SEQ ID NO: 156087 - RNA, 22 nt, synthetic construct
  source 1..22: mol_type = other RNA
ttcacttgtttcttttcactct

SEQ ID NO: 156088 - RNA, 22 nt, synthetic construct
  source 1..22: mol_type = other RNA
ttcactttcgtcatctataagg

SEQ ID NO: 156089 - RNA, 22 nt, synthetic construct
  source 1..22: mol_type = other RNA
ttcactttgatcatacacatcc

SEQ ID NO: 156090 - RNA, 22 nt, synthetic construct
  source 1..22: mol_type = other RNA
ttcacttttctggttttctgga

SEQ ID NO: 156091 - RNA, 22 nt, synthetic construct
  source 1..22: mol_type = other RNA
ttcacttttgagttcagaaaga

SEQ ID NO: 156092 - RNA, 22 nt, synthetic construct
  source 1..22: mol_type = other RNA
ttcacttttggaatttaagggg

SEQ ID NO: 156093 - RNA, 22 nt, synthetic construct
  source 1..22: mol_type = other RNA
ttcacttttgtgcaacataaat

SEQ ID NO: 156094 - RNA, 22 nt, synthetic construct
  source 1..22: mol_type = other RNA
ttcagaaagagaatagcagaaa

SEQ ID NO: 156095 - RNA, 22 nt, synthetic construct
  source 1..22: mol_type = other RNA
ttcagaaagattaatccttgtg

SEQ ID NO: 156096 - RNA, 22 nt, synthetic construct
  source 1..22: mol_type = other RNA
ttcagaaatagactcccaactt

SEQ ID NO: 156097 - RNA, 22 nt, synthetic construct
  source 1..22: mol_type = other RNA
ttcagaaatgtttaattcctac

SEQ ID NO: 156098 - RNA, 22 nt, synthetic construct
  source 1..22: mol_type = other RNA
ttcagaactcttctccaaggaa

SEQ ID NO: 156099 - RNA, 22 nt, synthetic construct
  source 1..22: mol_type = other RNA
ttcagaagaaattacttctttc

SEQ ID NO: 156100 - RNA, 22 nt, synthetic construct
  source 1..22: mol_type = other RNA
ttcagaagaggataaggggcag

SEQ ID NO: 156101 - RNA, 22 nt, synthetic construct
  source 1..22: mol_type = other RNA
ttcagaagccctgcagccagat

SEQ ID NO: 156102 - RNA, 22 nt, synthetic construct
  source 1..22: mol_type = other RNA
ttcagaagctaaattttcatag

SEQ ID NO: 156103 - RNA, 22 nt, synthetic construct
  source 1..22: mol_type = other RNA
ttcagaaggagtccagtcctgc

SEQ ID NO: 156104 - RNA, 22 nt, synthetic construct
  source 1..22: mol_type = other RNA
ttcagaataccagagattggga

SEQ ID NO: 156105 - RNA, 22 nt, synthetic construct
  source 1..22: mol_type = other RNA
ttcagacttaactataggagtt

SEQ ID NO: 156106 - RNA, 22 nt, synthetic construct
  source 1..22: mol_type = other RNA
ttcagagagacctgaagactgg

SEQ ID NO: 156107 - RNA, 22 nt, synthetic construct
  source 1..22: mol_type = other RNA
ttcagaggccctggtgctttct

SEQ ID NO: 156108 - RNA, 22 nt, synthetic construct
  source 1..22: mol_type = other RNA
ttcagaggtatttggggctagg

SEQ ID NO: 156109 - RNA, 22 nt, synthetic construct
  source 1..22: mol_type = other RNA
ttcagaggtctgttactcccga

SEQ ID NO: 156110 - RNA, 22 nt, synthetic construct
  source 1..22: mol_type = other RNA
ttcagagtgctgggtagagact

SEQ ID NO: 156111 - RNA, 22 nt, synthetic construct
  source 1..22: mol_type = other RNA
ttcagagtggctaatgtggctt

SEQ ID NO: 156112 - RNA, 22 nt, synthetic construct
  source 1..22: mol_type = other RNA
ttcagataacaaagggttcttg

SEQ ID NO: 156113 - RNA, 22 nt, synthetic construct
  source 1..22: mol_type = other RNA
ttcagatagaaaagacaatagc

SEQ ID NO: 156114 - RNA, 22 nt, synthetic construct
  source 1..22: mol_type = other RNA
ttcagatctctgacattggtta

SEQ ID NO: 156115 - RNA, 22 nt, synthetic construct
  source 1..22: mol_type = other RNA
ttcagatgacagaaataataca

SEQ ID NO: 156116 - RNA, 22 nt, synthetic construct
  source 1..22: mol_type = other RNA
ttcagatggccccaaaattacc

SEQ ID NO: 156117 - RNA, 22 nt, synthetic construct
  source 1..22: mol_type = other RNA
ttcagattgaccttgtatccag

SEQ ID NO: 156118 - RNA, 22 nt, synthetic construct
  source 1..22: mol_type = other RNA
ttcagattgcttgagagagata

SEQ ID NO: 156119 - RNA, 22 nt, synthetic construct
  source 1..22: mol_type = other RNA
ttcagcaaggaccattagcagt

SEQ ID NO: 156120 - RNA, 22 nt, synthetic construct
  source 1..22: mol_type = other RNA
ttcagcacaatactgtctcagt

SEQ ID NO: 156121 - RNA, 22 nt, synthetic construct
  source 1..22: mol_type = other RNA
ttcagcactgctattgataaat

SEQ ID NO: 156122 - RNA, 22 nt, synthetic construct
  source 1..22: mol_type = other RNA
ttcagcagcagagaagtgaagc

SEQ ID NO: 156123 - RNA, 22 nt, synthetic construct
  source 1..22: mol_type = other RNA
ttcagcatagcagaaccttaga

SEQ ID NO: 156124 - RNA, 22 nt, synthetic construct
  source 1..22: mol_type = other RNA
ttcagcatcttcactgactaca

SEQ ID NO: 156125 - RNA, 22 nt, synthetic construct
  source 1..22: mol_type = other RNA
ttcagccaaagctggcatgttg

SEQ ID NO: 156126 - RNA, 22 nt, synthetic construct
  source 1..22: mol_type = other RNA
ttcagccatcccagctacataa

SEQ ID NO: 156127 - RNA, 22 nt, synthetic construct
  source 1..22: mol_type = other RNA
ttcagccctgatagatattggc

SEQ ID NO: 156128 - RNA, 22 nt, synthetic construct
  source 1..22: mol_type = other RNA
ttcagcctaagcaagttacatg

SEQ ID NO: 156129 - RNA, 22 nt, synthetic construct
  source 1..22: mol_type = other RNA
ttcagcctgcagaaggagaaac

SEQ ID NO: 156130 - RNA, 22 nt, synthetic construct
  source 1..22: mol_type = other RNA
ttcagcctgtgtcagtgacagt

SEQ ID NO: 156131 - RNA, 22 nt, synthetic construct
  source 1..22: mol_type = other RNA
ttcagcgcttgaacaaatatga

SEQ ID NO: 156132 - RNA, 22 nt, synthetic construct
  source 1..22: mol_type = other RNA
ttcagctatggtgttatttgtt

SEQ ID NO: 156133 - RNA, 22 nt, synthetic construct
  source 1..22: mol_type = other RNA
ttcagctcaaacagcttgacat

SEQ ID NO: 156134 - RNA, 22 nt, synthetic construct
  source 1..22: mol_type = other RNA
ttcagcttacagtcatcacagt

SEQ ID NO: 156135 - RNA, 22 nt, synthetic construct
  source 1..22: mol_type = other RNA
ttcagctttaaagagaaatagt

SEQ ID NO: 156136 - RNA, 22 nt, synthetic construct
  source 1..22: mol_type = other RNA
ttcaggaacaccttgaacatga

SEQ ID NO: 156137 - RNA, 22 nt, synthetic construct
  source 1..22: mol_type = other RNA
ttcaggaatgcaaagtttccta

SEQ ID NO: 156138 - RNA, 22 nt, synthetic construct
  source 1..22: mol_type = other RNA
ttcaggacactggaggtgcaca

SEQ ID NO: 156139 - RNA, 22 nt, synthetic construct
  source 1..22: mol_type = other RNA
ttcaggacagattaaaatcaga

SEQ ID NO: 156140 - RNA, 22 nt, synthetic construct
  source 1..22: mol_type = other RNA
ttcaggacagtcatcctcaaca

SEQ ID NO: 156141 - RNA, 22 nt, synthetic construct
  source 1..22: mol_type = other RNA
ttcaggacagttattcttcagc

SEQ ID NO: 156142 - RNA, 22 nt, synthetic construct
  source 1..22: mol_type = other RNA
ttcaggaccagcttgggcaaga

SEQ ID NO: 156143 - RNA, 22 nt, synthetic construct
  source 1..22: mol_type = other RNA
ttcaggactcatgagagctgtg

SEQ ID NO: 156144 - RNA, 22 nt, synthetic construct
  source 1..22: mol_type = other RNA
ttcaggagttttgcctctttgc

SEQ ID NO: 156145 - RNA, 22 nt, synthetic construct
  source 1..22: mol_type = other RNA
ttcagggaaggctgcaagcact

SEQ ID NO: 156146 - RNA, 22 nt, synthetic construct
  source 1..22: mol_type = other RNA
ttcagggagaattggtagtcaa

SEQ ID NO: 156147 - RNA, 22 nt, synthetic construct
  source 1..22: mol_type = other RNA
ttcagggggctaaatgctcaca

SEQ ID NO: 156148 - RNA, 22 nt, synthetic construct
  source 1..22: mol_type = other RNA
ttcaggggggccactggaaacc

SEQ ID NO: 156149 - RNA, 22 nt, synthetic construct
  source 1..22: mol_type = other RNA
ttcaggtattgagcctgttccg

SEQ ID NO: 156150 - RNA, 22 nt, synthetic construct
  source 1..22: mol_type = other RNA
ttcaggtctatgtgacagaatg

SEQ ID NO: 156151 - RNA, 22 nt, synthetic construct
  source 1..22: mol_type = other RNA
ttcaggtctctctgaaattagc

SEQ ID NO: 156152 - RNA, 22 nt, synthetic construct
  source 1..22: mol_type = other RNA
ttcaggtgcctcctgcctcagc

SEQ ID NO: 156153 - RNA, 22 nt, synthetic construct
  source 1..22: mol_type = other RNA
ttcaggtggtatttaatctgtc

SEQ ID NO: 156154 - RNA, 22 nt, synthetic construct
  source 1..22: mol_type = other RNA
ttcaggtgtgtaaacactgttc

SEQ ID NO: 156155 - RNA, 22 nt, synthetic construct
  source 1..22: mol_type = other RNA
ttcaggttcaagcgactctcct

SEQ ID NO: 156156 - RNA, 22 nt, synthetic construct
  source 1..22: mol_type = other RNA
ttcaggttttcgaccaagttac

SEQ ID NO: 156157 - RNA, 22 nt, synthetic construct
  source 1..22: mol_type = other RNA
ttcagtaaatgaaatttgaggc

SEQ ID NO: 156158 - RNA, 22 nt, synthetic construct
  source 1..22: mol_type = other RNA
ttcagtacacgaaaatatccct

SEQ ID NO: 156159 - RNA, 22 nt, synthetic construct
  source 1..22: mol_type = other RNA
ttcagtatgaatgcacgtgaag

SEQ ID NO: 156160 - RNA, 22 nt, synthetic construct
  source 1..22: mol_type = other RNA
ttcagtatgtgtctctgacatg

SEQ ID NO: 156161 - RNA, 22 nt, synthetic construct
  source 1..22: mol_type = other RNA
ttcagtcaacaccaagcaacac

SEQ ID NO: 156162 - RNA, 22 nt, synthetic construct
  source 1..22: mol_type = other RNA
ttcagtcaccaaacgtttagat

SEQ ID NO: 156163 - RNA, 22 nt, synthetic construct
  source 1..22: mol_type = other RNA
ttcagtcagttctctgccccgg

SEQ ID NO: 156164 - RNA, 22 nt, synthetic construct
  source 1..22: mol_type = other RNA
ttcagtccagatattatcctcc

SEQ ID NO: 156165 - RNA, 22 nt, synthetic construct
  source 1..22: mol_type = other RNA
ttcagtccctcctttctagaat

SEQ ID NO: 156166 - RNA, 22 nt, synthetic construct
  source 1..22: mol_type = other RNA
ttcagtccttaccactgaagtg

SEQ ID NO: 156167 - RNA, 22 nt, synthetic construct
  source 1..22: mol_type = other RNA
ttcagtcggttcttcaccgtgc

SEQ ID NO: 156168 - RNA, 22 nt, synthetic construct
  source 1..22: mol_type = other RNA
ttcagtcttggtagtttgcacg

SEQ ID NO: 156169 - RNA, 22 nt, synthetic construct
  source 1..22: mol_type = other RNA
ttcagtgagtagggaaggtgcc

SEQ ID NO: 156170 - RNA, 22 nt, synthetic construct
  source 1..22: mol_type = other RNA
ttcagtgccaacacatggggca

SEQ ID NO: 156171 - RNA, 22 nt, synthetic construct
  source 1..22: mol_type = other RNA
ttcagtggtaaggactgaagtc

SEQ ID NO: 156172 - RNA, 22 nt, synthetic construct
  source 1..22: mol_type = other RNA
ttcagtggtgcaatcacggctg

SEQ ID NO: 156173 - RNA, 22 nt, synthetic construct
  source 1..22: mol_type = other RNA
ttcagtggttggaaaactttta

SEQ ID NO: 156174 - RNA, 22 nt, synthetic construct
  source 1..22: mol_type = other RNA
ttcagtgtagtcagacacacta

SEQ ID NO: 156175 - RNA, 22 nt, synthetic construct
  source 1..22: mol_type = other RNA
ttcagtgtgtccacacaatggt

SEQ ID NO: 156176 - RNA, 22 nt, synthetic construct
  source 1..22: mol_type = other RNA
ttcagttaaaagttttccaacc

SEQ ID NO: 156177 - RNA, 22 nt, synthetic construct
  source 1..22: mol_type = other RNA
ttcagttaacttattggaaaac

SEQ ID NO: 156178 - RNA, 22 nt, synthetic construct
  source 1..22: mol_type = other RNA
ttcagttctttcggatatttac

SEQ ID NO: 156179 - RNA, 22 nt, synthetic construct
  source 1..22: mol_type = other RNA
ttcagttgaaaagtatggttga

SEQ ID NO: 156180 - RNA, 22 nt, synthetic construct
  source 1..22: mol_type = other RNA
ttcagttgcatgaatttgtttt

SEQ ID NO: 156181 - RNA, 22 nt, synthetic construct
  source 1..22: mol_type = other RNA
ttcagttggtgaagagagcctg

SEQ ID NO: 156182 - RNA, 22 nt, synthetic construct
  source 1..22: mol_type = other RNA
ttcagtttagtaaatctttggt

SEQ ID NO: 156183 - RNA, 22 nt, synthetic construct
  source 1..22: mol_type = other RNA
ttcagtttatgggtcaaccact

SEQ ID NO: 156184 - RNA, 22 nt, synthetic construct
  source 1..22: mol_type = other RNA
ttcagtttgctagtattttgtt

SEQ ID NO: 156185 - RNA, 22 nt, synthetic construct
  source 1..22: mol_type = other RNA
ttcagttttatcaattagttcc

SEQ ID NO: 156186 - RNA, 22 nt, synthetic construct
  source 1..22: mol_type = other RNA
ttcagttttgagtggcatcata

SEQ ID NO: 156187 - RNA, 22 nt, synthetic construct
  source 1..22: mol_type = other RNA
ttcataaaatgatggcaacaat

SEQ ID NO: 156188 - RNA, 22 nt, synthetic construct
  source 1..22: mol_type = other RNA
ttcataaacacagaacactaaa

SEQ ID NO: 156189 - RNA, 22 nt, synthetic construct
  source 1..22: mol_type = other RNA
ttcataacaaagctctgatgct

SEQ ID NO: 156190 - RNA, 22 nt, synthetic construct
  source 1..22: mol_type = other RNA
ttcatacgttaactgtattgca

SEQ ID NO: 156191 - RNA, 22 nt, synthetic construct
  source 1..22: mol_type = other RNA
ttcatactattttctatagtgg

SEQ ID NO: 156192 - RNA, 22 nt, synthetic construct
  source 1..22: mol_type = other RNA
ttcatactgaaggcatagggcc

SEQ ID NO: 156193 - RNA, 22 nt, synthetic construct
  source 1..22: mol_type = other RNA
ttcatagatcaccaggggctgg

SEQ ID NO: 156194 - RNA, 22 nt, synthetic construct
  source 1..22: mol_type = other RNA
ttcatagatgttatgccccctc

SEQ ID NO: 156195 - RNA, 22 nt, synthetic construct
  source 1..22: mol_type = other RNA
ttcatagcagaatggccctgcg

SEQ ID NO: 156196 - RNA, 22 nt, synthetic construct
  source 1..22: mol_type = other RNA
ttcatagcagcattgtttacag

SEQ ID NO: 156197 - RNA, 22 nt, synthetic construct
  source 1..22: mol_type = other RNA
ttcataggaaatacttgatcta

SEQ ID NO: 156198 - RNA, 22 nt, synthetic construct
  source 1..22: mol_type = other RNA
ttcataggcatctctcccttcc

SEQ ID NO: 156199 - RNA, 22 nt, synthetic construct
  source 1..22: mol_type = other RNA
ttcataggtaatactctagtgg

SEQ ID NO: 156200 - RNA, 22 nt, synthetic construct
  source 1..22: mol_type = other RNA
ttcatagtagctgttgaattgt

SEQ ID NO: 156201 - RNA, 22 nt, synthetic construct
  source 1..22: mol_type = other RNA
ttcatagtcatcattattagca

SEQ ID NO: 156202 - RNA, 22 nt, synthetic construct
  source 1..22: mol_type = other RNA
ttcatataagtggaatcattcc

SEQ ID NO: 156203 - RNA, 22 nt, synthetic construct
  source 1..22: mol_type = other RNA
ttcatataatggagtactatgc

SEQ ID NO: 156204 - RNA, 22 nt, synthetic construct
  source 1..22: mol_type = other RNA
ttcatatctgattttgtgtctt

SEQ ID NO: 156205 - RNA, 22 nt, synthetic construct
  source 1..22: mol_type = other RNA
ttcatatgaaatcacacaatct

SEQ ID NO: 156206 - RNA, 22 nt, synthetic construct
  source 1..22: mol_type = other RNA
ttcatatgctttgagctacaaa

SEQ ID NO: 156207 - RNA, 22 nt, synthetic construct
  source 1..22: mol_type = other RNA
ttcatatttcccttttggatgc

SEQ ID NO: 156208 - RNA, 22 nt, synthetic construct
  source 1..22: mol_type = other RNA
ttcatatttgttcaagcgctga

SEQ ID NO: 156209 - RNA, 22 nt, synthetic construct
  source 1..22: mol_type = other RNA
ttcatattttgtgggaattcag

SEQ ID NO: 156210 - RNA, 22 nt, synthetic construct
  source 1..22: mol_type = other RNA
ttcatcactcactggcctgagc

SEQ ID NO: 156211 - RNA, 22 nt, synthetic construct
  source 1..22: mol_type = other RNA
ttcatcagtccctgtgtttttt

SEQ ID NO: 156212 - RNA, 22 nt, synthetic construct
  source 1..22: mol_type = other RNA
ttcatcatcttttgcctggatg

SEQ ID NO: 156213 - RNA, 22 nt, synthetic construct
  source 1..22: mol_type = other RNA
ttcatccaaacagaaaccctgt

SEQ ID NO: 156214 - RNA, 22 nt, synthetic construct
  source 1..22: mol_type = other RNA
ttcatccaaattattgacaaga

SEQ ID NO: 156215 - RNA, 22 nt, synthetic construct
  source 1..22: mol_type = other RNA
ttcatccaggcaaaagatgatg

SEQ ID NO: 156216 - RNA, 22 nt, synthetic construct
  source 1..22: mol_type = other RNA
ttcatccagtttaaagctttgt

SEQ ID NO: 156217 - RNA, 22 nt, synthetic construct
  source 1..22: mol_type = other RNA
ttcatccatgttgttgaatgtg

SEQ ID NO: 156218 - RNA, 22 nt, synthetic construct
  source 1..22: mol_type = other RNA
ttcatccctctaaataggtatt

SEQ ID NO: 156219 - RNA, 22 nt, synthetic construct
  source 1..22: mol_type = other RNA
ttcatcgtaaaaagccatttat

SEQ ID NO: 156220 - RNA, 22 nt, synthetic construct
  source 1..22: mol_type = other RNA
ttcatctaaacgtttggtgact

SEQ ID NO: 156221 - RNA, 22 nt, synthetic construct
  source 1..22: mol_type = other RNA
ttcatctatgtcccctggggcc

SEQ ID NO: 156222 - RNA, 22 nt, synthetic construct
  source 1..22: mol_type = other RNA
ttcatctctcgatggacattta

SEQ ID NO: 156223 - RNA, 22 nt, synthetic construct
  source 1..22: mol_type = other RNA
ttcatctgcagtgtccatctcc

SEQ ID NO: 156224 - RNA, 22 nt, synthetic construct
  source 1..22: mol_type = other RNA
ttcatctggaccagttactctc

SEQ ID NO: 156225 - RNA, 22 nt, synthetic construct
  source 1..22: mol_type = other RNA
ttcatctgttaatgggcacttg

SEQ ID NO: 156226 - RNA, 22 nt, synthetic construct
  source 1..22: mol_type = other RNA
ttcatcttgacttcacttccaa

SEQ ID NO: 156227 - RNA, 22 nt, synthetic construct
  source 1..22: mol_type = other RNA
ttcatctttcctgatcacaccc

SEQ ID NO: 156228 - RNA, 22 nt, synthetic construct
  source 1..22: mol_type = other RNA
ttcatgaaatcccctttagtgt

SEQ ID NO: 156229 - RNA, 22 nt, synthetic construct
  source 1..22: mol_type = other RNA
ttcatgaacaattttctctcat

SEQ ID NO: 156230 - RNA, 22 nt, synthetic construct
  source 1..22: mol_type = other RNA
ttcatgaaccttcaccaaagat

SEQ ID NO: 156231 - RNA, 22 nt, synthetic construct
  source 1..22: mol_type = other RNA
ttcatgacaagaatctttggca

SEQ ID NO: 156232 - RNA, 22 nt, synthetic construct
  source 1..22: mol_type = other RNA
ttcatgattcagtcttggtagt

SEQ ID NO: 156233 - RNA, 22 nt, synthetic construct
  source 1..22: mol_type = other RNA
ttcatgatttggtgtgtgcaaa

SEQ ID NO: 156234 - RNA, 22 nt, synthetic construct
  source 1..22: mol_type = other RNA
ttcatgcaactgaaaacatctt

SEQ ID NO: 156235 - RNA, 22 nt, synthetic construct
  source 1..22: mol_type = other RNA
ttcatgccatcctggatttggg

SEQ ID NO: 156236 - RNA, 22 nt, synthetic construct
  source 1..22: mol_type = other RNA
ttcatgcctttcagcatagcag

SEQ ID NO: 156237 - RNA, 22 nt, synthetic construct
  source 1..22: mol_type = other RNA
ttcatgcgacatatcagggatc

SEQ ID NO: 156238 - RNA, 22 nt, synthetic construct
  source 1..22: mol_type = other RNA
ttcatgctgggagaccaggagt

SEQ ID NO: 156239 - RNA, 22 nt, synthetic construct
  source 1..22: mol_type = other RNA
ttcatgctgtgaatttggattt

SEQ ID NO: 156240 - RNA, 22 nt, synthetic construct
  source 1..22: mol_type = other RNA
ttcatggactagactgcctgag

SEQ ID NO: 156241 - RNA, 22 nt, synthetic construct
  source 1..22: mol_type = other RNA
ttcatggacttcctattttata

SEQ ID NO: 156242 - RNA, 22 nt, synthetic construct
  source 1..22: mol_type = other RNA
ttcatgggaagatgctccctct

SEQ ID NO: 156243 - RNA, 22 nt, synthetic construct
  source 1..22: mol_type = other RNA
ttcatgggtggaaattaaacac

SEQ ID NO: 156244 - RNA, 22 nt, synthetic construct
  source 1..22: mol_type = other RNA
ttcatgggttgatttttaatga

SEQ ID NO: 156245 - RNA, 22 nt, synthetic construct
  source 1..22: mol_type = other RNA
ttcatggtatcaattgtaatgt

SEQ ID NO: 156246 - RNA, 22 nt, synthetic construct
  source 1..22: mol_type = other RNA
ttcatggttttaatgggcatta

SEQ ID NO: 156247 - RNA, 22 nt, synthetic construct
  source 1..22: mol_type = other RNA
ttcatgtaatgcaaactctaaa

SEQ ID NO: 156248 - RNA, 22 nt, synthetic construct
  source 1..22: mol_type = other RNA
ttcatgtacaatgaattagcaa

SEQ ID NO: 156249 - RNA, 22 nt, synthetic construct
  source 1..22: mol_type = other RNA
ttcatgtcccctgtccaagtat

SEQ ID NO: 156250 - RNA, 22 nt, synthetic construct
  source 1..22: mol_type = other RNA
ttcatgtctgtgtagttcatca

SEQ ID NO: 156251 - RNA, 22 nt, synthetic construct
  source 1..22: mol_type = other RNA
ttcatgtgtgcttacacacacg

SEQ ID NO: 156252 - RNA, 22 nt, synthetic construct
  source 1..22: mol_type = other RNA
ttcatgttagcataattcgaaa

SEQ ID NO: 156253 - RNA, 22 nt, synthetic construct
  source 1..22: mol_type = other RNA
ttcatgttcaaggtgttcctga

SEQ ID NO: 156254 - RNA, 22 nt, synthetic construct
  source 1..22: mol_type = other RNA
ttcatgtttacagaaatatacc

SEQ ID NO: 156255 - RNA, 22 nt, synthetic construct
  source 1..22: mol_type = other RNA
ttcatgtttgtggttttaacct

SEQ ID NO: 156256 - RNA, 22 nt, synthetic construct
  source 1..22: mol_type = other RNA
ttcattacatttgcttaggctg

SEQ ID NO: 156257 - RNA, 22 nt, synthetic construct
  source 1..22: mol_type = other RNA
ttcattaccaggctggaagaat

SEQ ID NO: 156258 - RNA, 22 nt, synthetic construct
  source 1..22: mol_type = other RNA
ttcattacttttttgtagagac

SEQ ID NO: 156259 - RNA, 22 nt, synthetic construct
  source 1..22: mol_type = other RNA
ttcattagaattcaggacagtc

SEQ ID NO: 156260 - RNA, 22 nt, synthetic construct
  source 1..22: mol_type = other RNA
ttcattaggttgatggctgtac

SEQ ID NO: 156261 - RNA, 22 nt, synthetic construct
  source 1..22: mol_type = other RNA
ttcattcatatttgttcaagcg

SEQ ID NO: 156262 - RNA, 22 nt, synthetic construct
  source 1..22: mol_type = other RNA
ttcattcatctgttaatgggca

SEQ ID NO: 156263 - RNA, 22 nt, synthetic construct
  source 1..22: mol_type = other RNA
ttcattcatgacaagaatcttt

SEQ ID NO: 156264 - RNA, 22 nt, synthetic construct
  source 1..22: mol_type = other RNA
ttcattccgcgtttattagaac

SEQ ID NO: 156265 - RNA, 22 nt, synthetic construct
  source 1..22: mol_type = other RNA
ttcattcgtagcaggtttagga

SEQ ID NO: 156266 - RNA, 22 nt, synthetic construct
  source 1..22: mol_type = other RNA
ttcattcgttcaaaacatcatc

SEQ ID NO: 156267 - RNA, 22 nt, synthetic construct
  source 1..22: mol_type = other RNA
ttcattctacctggagcctgag

SEQ ID NO: 156268 - RNA, 22 nt, synthetic construct
  source 1..22: mol_type = other RNA
ttcattcttgacatgattgagg

SEQ ID NO: 156269 - RNA, 22 nt, synthetic construct
  source 1..22: mol_type = other RNA
ttcattctttttactcgagggt

SEQ ID NO: 156270 - RNA, 22 nt, synthetic construct
  source 1..22: mol_type = other RNA
ttcattgtacatgaagtcctca

SEQ ID NO: 156271 - RNA, 22 nt, synthetic construct
  source 1..22: mol_type = other RNA
ttcatttacaaaaacacactga

SEQ ID NO: 156272 - RNA, 22 nt, synthetic construct
  source 1..22: mol_type = other RNA
ttcatttactgaaatcctagcc

SEQ ID NO: 156273 - RNA, 22 nt, synthetic construct
  source 1..22: mol_type = other RNA
ttcatttattaaagtagaaggc

SEQ ID NO: 156274 - RNA, 22 nt, synthetic construct
  source 1..22: mol_type = other RNA
ttcatttcaggaatgcaaagtt

SEQ ID NO: 156275 - RNA, 22 nt, synthetic construct
  source 1..22: mol_type = other RNA
ttcatttccaaagatcatgggt

SEQ ID NO: 156276 - RNA, 22 nt, synthetic construct
  source 1..22: mol_type = other RNA
ttcatttctaagccatgtttct

SEQ ID NO: 156277 - RNA, 22 nt, synthetic construct
  source 1..22: mol_type = other RNA
ttcatttgagaatttcaggtgt

SEQ ID NO: 156278 - RNA, 22 nt, synthetic construct
  source 1..22: mol_type = other RNA
ttcatttggcctctgcggcggc

SEQ ID NO: 156279 - RNA, 22 nt, synthetic construct
  source 1..22: mol_type = other RNA
ttcatttgtaattcatcctact

SEQ ID NO: 156280 - RNA, 22 nt, synthetic construct
  source 1..22: mol_type = other RNA
ttcattttaataagcttcgaag

SEQ ID NO: 156281 - RNA, 22 nt, synthetic construct
  source 1..22: mol_type = other RNA
ttcattttactgctatacaacc

SEQ ID NO: 156282 - RNA, 22 nt, synthetic construct
  source 1..22: mol_type = other RNA
ttccaaaagcaggccctgagaa

SEQ ID NO: 156283 - RNA, 22 nt, synthetic construct
  source 1..22: mol_type = other RNA
ttccaaaagtgaatatagctaa

SEQ ID NO: 156284 - RNA, 22 nt, synthetic construct
  source 1..22: mol_type = other RNA
ttccaaaatattgaagagggaa

SEQ ID NO: 156285 - RNA, 22 nt, synthetic construct
  source 1..22: mol_type = other RNA
ttccaaacttctgaccttgtga

SEQ ID NO: 156286 - RNA, 22 nt, synthetic construct
  source 1..22: mol_type = other RNA
ttccaaagatataaaaatggtc

SEQ ID NO: 156287 - RNA, 22 nt, synthetic construct
  source 1..22: mol_type = other RNA
ttccaaagatcatgggttttaa

SEQ ID NO: 156288 - RNA, 22 nt, synthetic construct
  source 1..22: mol_type = other RNA
ttccaaagtatgcatagcaggg

SEQ ID NO: 156289 - RNA, 22 nt, synthetic construct
  source 1..22: mol_type = other RNA
ttccaaataatcccgcaccttg

SEQ ID NO: 156290 - RNA, 22 nt, synthetic construct
  source 1..22: mol_type = other RNA
ttccaaatgtctgtctttatgc

SEQ ID NO: 156291 - RNA, 22 nt, synthetic construct
  source 1..22: mol_type = other RNA
ttccaaattagctttctcccag

SEQ ID NO: 156292 - RNA, 22 nt, synthetic construct
  source 1..22: mol_type = other RNA
ttccaaattcaaagcaagttaa

SEQ ID NO: 156293 - RNA, 22 nt, synthetic construct
  source 1..22: mol_type = other RNA
ttccaacagtttacacgccttc

SEQ ID NO: 156294 - RNA, 22 nt, synthetic construct
  source 1..22: mol_type = other RNA
ttccaaccaagcccaacttttt

SEQ ID NO: 156295 - RNA, 22 nt, synthetic construct
  source 1..22: mol_type = other RNA
ttccaaccactgaatcagattt

SEQ ID NO: 156296 - RNA, 22 nt, synthetic construct
  source 1..22: mol_type = other RNA
ttccaaccatcttcttagtgtt

SEQ ID NO: 156297 - RNA, 22 nt, synthetic construct
  source 1..22: mol_type = other RNA
ttccaactgtataaatgttcag

SEQ ID NO: 156298 - RNA, 22 nt, synthetic construct
  source 1..22: mol_type = other RNA
ttccaagaaccctttgttatct

SEQ ID NO: 156299 - RNA, 22 nt, synthetic construct
  source 1..22: mol_type = other RNA
ttccaagagaggaataaatggt

SEQ ID NO: 156300 - RNA, 22 nt, synthetic construct
  source 1..22: mol_type = other RNA
ttccaagattgaaaatggttta

SEQ ID NO: 156301 - RNA, 22 nt, synthetic construct
  source 1..22: mol_type = other RNA
ttccaagattttcccaatctct

SEQ ID NO: 156302 - RNA, 22 nt, synthetic construct
  source 1..22: mol_type = other RNA
ttccaagccttaaaagtgctgc

SEQ ID NO: 156303 - RNA, 22 nt, synthetic construct
  source 1..22: mol_type = other RNA
ttccaagtcccggaagctgggc

SEQ ID NO: 156304 - RNA, 22 nt, synthetic construct
  source 1..22: mol_type = other RNA
ttccaataagttaactgaaatc

SEQ ID NO: 156305 - RNA, 22 nt, synthetic construct
  source 1..22: mol_type = other RNA
ttccaatccgggaacatgacat

SEQ ID NO: 156306 - RNA, 22 nt, synthetic construct
  source 1..22: mol_type = other RNA
ttccaatccttccttcatgtcc

SEQ ID NO: 156307 - RNA, 22 nt, synthetic construct
  source 1..22: mol_type = other RNA
ttccaattgcagaaaaatagaa

SEQ ID NO: 156308 - RNA, 22 nt, synthetic construct
  source 1..22: mol_type = other RNA
ttccacaaccactggggagtgt

SEQ ID NO: 156309 - RNA, 22 nt, synthetic construct
  source 1..22: mol_type = other RNA
ttccacagctatcaggccttcc

SEQ ID NO: 156310 - RNA, 22 nt, synthetic construct
  source 1..22: mol_type = other RNA
ttccacagtgactttactgttc

SEQ ID NO: 156311 - RNA, 22 nt, synthetic construct
  source 1..22: mol_type = other RNA
ttccacataaagtcttgctgga

SEQ ID NO: 156312 - RNA, 22 nt, synthetic construct
  source 1..22: mol_type = other RNA
ttccacataattgaacccactg

SEQ ID NO: 156313 - RNA, 22 nt, synthetic construct
  source 1..22: mol_type = other RNA
ttccacatattttaaaagtcag

SEQ ID NO: 156314 - RNA, 22 nt, synthetic construct
  source 1..22: mol_type = other RNA
ttccacatgttactcattatgg

SEQ ID NO: 156315 - RNA, 22 nt, synthetic construct
  source 1..22: mol_type = other RNA
ttccacatttctaatttccaag

SEQ ID NO: 156316 - RNA, 22 nt, synthetic construct
  source 1..22: mol_type = other RNA
ttccacccaagtggagcctgct

SEQ ID NO: 156317 - RNA, 22 nt, synthetic construct
  source 1..22: mol_type = other RNA
ttccacccatgaagccagcatt

SEQ ID NO: 156318 - RNA, 22 nt, synthetic construct
  source 1..22: mol_type = other RNA
ttccacctccatcactgactgg

SEQ ID NO: 156319 - RNA, 22 nt, synthetic construct
  source 1..22: mol_type = other RNA
ttccacctgctctttatctcca

SEQ ID NO: 156320 - RNA, 22 nt, synthetic construct
  source 1..22: mol_type = other RNA
ttccacgctgtggcttgggtga

SEQ ID NO: 156321 - RNA, 22 nt, synthetic construct
  source 1..22: mol_type = other RNA
ttccacggaatgcccctttgag

SEQ ID NO: 156322 - RNA, 22 nt, synthetic construct
  source 1..22: mol_type = other RNA
ttccacgggtaaaaataaatct

SEQ ID NO: 156323 - RNA, 22 nt, synthetic construct
  source 1..22: mol_type = other RNA
ttccactaatgtccttttcctg

SEQ ID NO: 156324 - RNA, 22 nt, synthetic construct
  source 1..22: mol_type = other RNA
ttccactagtgggatcaaacca

SEQ ID NO: 156325 - RNA, 22 nt, synthetic construct
  source 1..22: mol_type = other RNA
ttccactctctggctgcaattg

SEQ ID NO: 156326 - RNA, 22 nt, synthetic construct
  source 1..22: mol_type = other RNA
ttccacttatatgaagctaaaa

SEQ ID NO: 156327 - RNA, 22 nt, synthetic construct
  source 1..22: mol_type = other RNA
ttccactttgaggttattaaga

SEQ ID NO: 156328 - RNA, 22 nt, synthetic construct
  source 1..22: mol_type = other RNA
ttccagaaaactggcaatcaaa

SEQ ID NO: 156329 - RNA, 22 nt, synthetic construct
  source 1..22: mol_type = other RNA
ttccagaaacttccaaccatct

SEQ ID NO: 156330 - RNA, 22 nt, synthetic construct
  source 1..22: mol_type = other RNA
ttccagaaggagaaaacaaaaa

SEQ ID NO: 156331 - RNA, 22 nt, synthetic construct
  source 1..22: mol_type = other RNA
ttccagaagtaactcttgagtt

SEQ ID NO: 156332 - RNA, 22 nt, synthetic construct
  source 1..22: mol_type = other RNA
ttccagacaaaaattttcattc

SEQ ID NO: 156333 - RNA, 22 nt, synthetic construct
  source 1..22: mol_type = other RNA
ttccagaccagcagttcaagca

SEQ ID NO: 156334 - RNA, 22 nt, synthetic construct
  source 1..22: mol_type = other RNA
ttccagagaattcagagtggct

SEQ ID NO: 156335 - RNA, 22 nt, synthetic construct
  source 1..22: mol_type = other RNA
ttccagagacaaagcataaaat

SEQ ID NO: 156336 - RNA, 22 nt, synthetic construct
  source 1..22: mol_type = other RNA
ttccagagggtaacgtgagctg

SEQ ID NO: 156337 - RNA, 22 nt, synthetic construct
  source 1..22: mol_type = other RNA
ttccagaggttcttttaaatgc

SEQ ID NO: 156338 - RNA, 22 nt, synthetic construct
  source 1..22: mol_type = other RNA
ttccagatgttttacacatgtc

SEQ ID NO: 156339 - RNA, 22 nt, synthetic construct
  source 1..22: mol_type = other RNA
ttccagattgaaatctaggcat

SEQ ID NO: 156340 - RNA, 22 nt, synthetic construct
  source 1..22: mol_type = other RNA
ttccagcaagactttatgtgga

SEQ ID NO: 156341 - RNA, 22 nt, synthetic construct
  source 1..22: mol_type = other RNA
ttccagcagggtaaagtcaatt

SEQ ID NO: 156342 - RNA, 22 nt, synthetic construct
  source 1..22: mol_type = other RNA
ttccagcattttataggcattc

SEQ ID NO: 156343 - RNA, 22 nt, synthetic construct
  source 1..22: mol_type = other RNA
ttccagccattctcttctggat

SEQ ID NO: 156344 - RNA, 22 nt, synthetic construct
  source 1..22: mol_type = other RNA
ttccagcctggtaatgaataga

SEQ ID NO: 156345 - RNA, 22 nt, synthetic construct
  source 1..22: mol_type = other RNA
ttccagcctttaatttagcgtt

SEQ ID NO: 156346 - RNA, 22 nt, synthetic construct
  source 1..22: mol_type = other RNA
ttccagcgtgtgcatgaccctg

SEQ ID NO: 156347 - RNA, 22 nt, synthetic construct
  source 1..22: mol_type = other RNA
ttccagctcacgttaccctctg

SEQ ID NO: 156348 - RNA, 22 nt, synthetic construct
  source 1..22: mol_type = other RNA
ttccaggaaaagcaaatgtcat

SEQ ID NO: 156349 - RNA, 22 nt, synthetic construct
  source 1..22: mol_type = other RNA
ttccaggaccaatttaccatct

SEQ ID NO: 156350 - RNA, 22 nt, synthetic construct
  source 1..22: mol_type = other RNA
ttccaggatcaaatctggctgc

SEQ ID NO: 156351 - RNA, 22 nt, synthetic construct
  source 1..22: mol_type = other RNA
ttccaggcctcgctcttggctt

SEQ ID NO: 156352 - RNA, 22 nt, synthetic construct
  source 1..22: mol_type = other RNA
ttccaggggggaaaaaaccata

SEQ ID NO: 156353 - RNA, 22 nt, synthetic construct
  source 1..22: mol_type = other RNA
ttccagggggtatggagacact

SEQ ID NO: 156354 - RNA, 22 nt, synthetic construct
  source 1..22: mol_type = other RNA
ttccaggtcattacatattttg

SEQ ID NO: 156355 - RNA, 22 nt, synthetic construct
  source 1..22: mol_type = other RNA
ttccaggtttacaggatatcag

SEQ ID NO: 156356 - RNA, 22 nt, synthetic construct
  source 1..22: mol_type = other RNA
ttccaggttttatctctctcaa

SEQ ID NO: 156357 - RNA, 22 nt, synthetic construct
  source 1..22: mol_type = other RNA
ttccagtacatctcaattcaga

SEQ ID NO: 156358 - RNA, 22 nt, synthetic construct
  source 1..22: mol_type = other RNA
ttccagtactttttcatccaaa

SEQ ID NO: 156359 - RNA, 22 nt, synthetic construct
  source 1..22: mol_type = other RNA
ttccagtatattcatagtagct

SEQ ID NO: 156360 - RNA, 22 nt, synthetic construct
  source 1..22: mol_type = other RNA
ttccagtatgatgccactcaaa

SEQ ID NO: 156361 - RNA, 22 nt, synthetic construct
  source 1..22: mol_type = other RNA
ttccagtcctttgtgtcaagta

SEQ ID NO: 156362 - RNA, 22 nt, synthetic construct
  source 1..22: mol_type = other RNA
ttccagtcttctcatacagatt

SEQ ID NO: 156363 - RNA, 22 nt, synthetic construct
  source 1..22: mol_type = other RNA
ttccagtggcccccctgaaaaa

SEQ ID NO: 156364 - RNA, 22 nt, synthetic construct
  source 1..22: mol_type = other RNA
ttccagtgtttggtttttatgg

SEQ ID NO: 156365 - RNA, 22 nt, synthetic construct
  source 1..22: mol_type = other RNA
ttccagtgttttaggggggaaa

SEQ ID NO: 156366 - RNA, 22 nt, synthetic construct
  source 1..22: mol_type = other RNA
ttccagtttatatgcctagatg

SEQ ID NO: 156367 - RNA, 22 nt, synthetic construct
  source 1..22: mol_type = other RNA
ttccagtttctctgctttttct

SEQ ID NO: 156368 - RNA, 22 nt, synthetic construct
  source 1..22: mol_type = other RNA
ttccataaaaaccaaacactgg

SEQ ID NO: 156369 - RNA, 22 nt, synthetic construct
  source 1..22: mol_type = other RNA
ttccataaaaagcgttggagac

SEQ ID NO: 156370 - RNA, 22 nt, synthetic construct
  source 1..22: mol_type = other RNA
ttccataagatctgtctttggc

SEQ ID NO: 156371 - RNA, 22 nt, synthetic construct
  source 1..22: mol_type = other RNA
ttccatacgaaagcctttattt

SEQ ID NO: 156372 - RNA, 22 nt, synthetic construct
  source 1..22: mol_type = other RNA
ttccatcagagaggctttttat

SEQ ID NO: 156373 - RNA, 22 nt, synthetic construct
  source 1..22: mol_type = other RNA
ttccatcagtggttgtgcttcg

SEQ ID NO: 156374 - RNA, 22 nt, synthetic construct
  source 1..22: mol_type = other RNA
ttccatcggtctgtatttctgc

SEQ ID NO: 156375 - RNA, 22 nt, synthetic construct
  source 1..22: mol_type = other RNA
ttccatctgttatagtgtgaaa

SEQ ID NO: 156376 - RNA, 22 nt, synthetic construct
  source 1..22: mol_type = other RNA
ttccatcttaggccataaatca

SEQ ID NO: 156377 - RNA, 22 nt, synthetic construct
  source 1..22: mol_type = other RNA
ttccatgagattacatagcaag

SEQ ID NO: 156378 - RNA, 22 nt, synthetic construct
  source 1..22: mol_type = other RNA
ttccatggaggggccagttgag

SEQ ID NO: 156379 - RNA, 22 nt, synthetic construct
  source 1..22: mol_type = other RNA
ttccatggtatgtgccatctcc

SEQ ID NO: 156380 - RNA, 22 nt, synthetic construct
  source 1..22: mol_type = other RNA
ttccatgtcttggctattgtca

SEQ ID NO: 156381 - RNA, 22 nt, synthetic construct
  source 1..22: mol_type = other RNA
ttccattattccataaaaacca

SEQ ID NO: 156382 - RNA, 22 nt, synthetic construct
  source 1..22: mol_type = other RNA
ttccattcaatccttgtaactt

SEQ ID NO: 156383 - RNA, 22 nt, synthetic construct
  source 1..22: mol_type = other RNA
ttccattcacacaccctttctt

SEQ ID NO: 156384 - RNA, 22 nt, synthetic construct
  source 1..22: mol_type = other RNA
ttccattcatgtaatgcaaact

SEQ ID NO: 156385 - RNA, 22 nt, synthetic construct
  source 1..22: mol_type = other RNA
ttccattccttttcgagactga

SEQ ID NO: 156386 - RNA, 22 nt, synthetic construct
  source 1..22: mol_type = other RNA
ttccattgtgcatatataccac

SEQ ID NO: 156387 - RNA, 22 nt, synthetic construct
  source 1..22: mol_type = other RNA
ttccattgttctctttgtttat

SEQ ID NO: 156388 - RNA, 22 nt, synthetic construct
  source 1..22: mol_type = other RNA
ttccatttgttttgtgtttgtg

SEQ ID NO: 156389 - RNA, 22 nt, synthetic construct
  source 1..22: mol_type = other RNA
ttccattttagatcaagtcctt

SEQ ID NO: 156390 - RNA, 22 nt, synthetic construct
  source 1..22: mol_type = other RNA
ttccatttttctgaccaactat

SEQ ID NO: 156391 - RNA, 22 nt, synthetic construct
  source 1..22: mol_type = other RNA
ttcccaaagacatcctgattta

SEQ ID NO: 156392 - RNA, 22 nt, synthetic construct
  source 1..22: mol_type = other RNA
ttcccaaagatagactcttcag

SEQ ID NO: 156393 - RNA, 22 nt, synthetic construct
  source 1..22: mol_type = other RNA
ttcccaaatccaggatggcatg

SEQ ID NO: 156394 - RNA, 22 nt, synthetic construct
  source 1..22: mol_type = other RNA
ttcccaaatgtcttaagaagga

SEQ ID NO: 156395 - RNA, 22 nt, synthetic construct
  source 1..22: mol_type = other RNA
ttcccaagatcataagctttta

SEQ ID NO: 156396 - RNA, 22 nt, synthetic construct
  source 1..22: mol_type = other RNA
ttcccaagcaagtgtggtggtc

SEQ ID NO: 156397 - RNA, 22 nt, synthetic construct
  source 1..22: mol_type = other RNA
ttcccaatcctttgtgcaggtc

SEQ ID NO: 156398 - RNA, 22 nt, synthetic construct
  source 1..22: mol_type = other RNA
ttcccaatctctggtattctga

SEQ ID NO: 156399 - RNA, 22 nt, synthetic construct
  source 1..22: mol_type = other RNA
ttcccacaaaatatgaagcatt

SEQ ID NO: 156400 - RNA, 22 nt, synthetic construct
  source 1..22: mol_type = other RNA
ttcccactgctatgactaattt

SEQ ID NO: 156401 - RNA, 22 nt, synthetic construct
  source 1..22: mol_type = other RNA
ttcccacttcgaaagttcagat

SEQ ID NO: 156402 - RNA, 22 nt, synthetic construct
  source 1..22: mol_type = other RNA
ttcccagacagggaatgcccct

SEQ ID NO: 156403 - RNA, 22 nt, synthetic construct
  source 1..22: mol_type = other RNA
ttcccagataacagtggttagg

SEQ ID NO: 156404 - RNA, 22 nt, synthetic construct
  source 1..22: mol_type = other RNA
ttcccagatacgttaaaggaaa

SEQ ID NO: 156405 - RNA, 22 nt, synthetic construct
  source 1..22: mol_type = other RNA
ttcccaggagctagaacagaat

SEQ ID NO: 156406 - RNA, 22 nt, synthetic construct
  source 1..22: mol_type = other RNA
ttcccagggtgtagccacaagc

SEQ ID NO: 156407 - RNA, 22 nt, synthetic construct
  source 1..22: mol_type = other RNA
ttcccaggtattttgttctctt

SEQ ID NO: 156408 - RNA, 22 nt, synthetic construct
  source 1..22: mol_type = other RNA
ttcccatctcactcacctagct

SEQ ID NO: 156409 - RNA, 22 nt, synthetic construct
  source 1..22: mol_type = other RNA
ttcccatctctagttttccagt

SEQ ID NO: 156410 - RNA, 22 nt, synthetic construct
  source 1..22: mol_type = other RNA
ttcccatgaacatggtttgatc

SEQ ID NO: 156411 - RNA, 22 nt, synthetic construct
  source 1..22: mol_type = other RNA
ttcccatgttcactgcagaatt

SEQ ID NO: 156412 - RNA, 22 nt, synthetic construct
  source 1..22: mol_type = other RNA
ttcccattaccaaaacctggta

SEQ ID NO: 156413 - RNA, 22 nt, synthetic construct
  source 1..22: mol_type = other RNA
ttcccatttgatttcttctttg

SEQ ID NO: 156414 - RNA, 22 nt, synthetic construct
  source 1..22: mol_type = other RNA
ttccccaagccaaattaataaa

SEQ ID NO: 156415 - RNA, 22 nt, synthetic construct
  source 1..22: mol_type = other RNA
ttccccacataggatagttaaa

SEQ ID NO: 156416 - RNA, 22 nt, synthetic construct
  source 1..22: mol_type = other RNA
ttccccacctttcctgcccctc

SEQ ID NO: 156417 - RNA, 22 nt, synthetic construct
  source 1..22: mol_type = other RNA
ttccccagcctcagcctcccaa

SEQ ID NO: 156418 - RNA, 22 nt, synthetic construct
  source 1..22: mol_type = other RNA
ttccccagggaaaccttactgt

SEQ ID NO: 156419 - RNA, 22 nt, synthetic construct
  source 1..22: mol_type = other RNA
ttccccattagagtaagcaact

SEQ ID NO: 156420 - RNA, 22 nt, synthetic construct
  source 1..22: mol_type = other RNA
ttccccattgacaatataggag

SEQ ID NO: 156421 - RNA, 22 nt, synthetic construct
  source 1..22: mol_type = other RNA
ttcccccaaaacttaggaggct

SEQ ID NO: 156422 - RNA, 22 nt, synthetic construct
  source 1..22: mol_type = other RNA
ttcccccaaagaaggaaaaaac

SEQ ID NO: 156423 - RNA, 22 nt, synthetic construct
  source 1..22: mol_type = other RNA
ttcccccaattaaactatagac

SEQ ID NO: 156424 - RNA, 22 nt, synthetic construct
  source 1..22: mol_type = other RNA
ttcccccctaaaacactggaag

SEQ ID NO: 156425 - RNA, 22 nt, synthetic construct
  source 1..22: mol_type = other RNA
ttcccccctctctctttctggg

SEQ ID NO: 156426 - RNA, 22 nt, synthetic construct
  source 1..22: mol_type = other RNA
ttcccccctggaacaatcaaac

SEQ ID NO: 156427 - RNA, 22 nt, synthetic construct
  source 1..22: mol_type = other RNA
ttccccctacacccagttcacc

SEQ ID NO: 156428 - RNA, 22 nt, synthetic construct
  source 1..22: mol_type = other RNA
ttcccccttatgtgtgtataac

SEQ ID NO: 156429 - RNA, 22 nt, synthetic construct
  source 1..22: mol_type = other RNA
ttcccctatactgtaaccctgt

SEQ ID NO: 156430 - RNA, 22 nt, synthetic construct
  source 1..22: mol_type = other RNA
ttcccctgctgttcccaagcaa

SEQ ID NO: 156431 - RNA, 22 nt, synthetic construct
  source 1..22: mol_type = other RNA
ttcccctggatcccccagcccc

SEQ ID NO: 156432 - RNA, 22 nt, synthetic construct
  source 1..22: mol_type = other RNA
ttcccctggtcgagctgggtga

SEQ ID NO: 156433 - RNA, 22 nt, synthetic construct
  source 1..22: mol_type = other RNA
ttccccttatatgggatatcta

SEQ ID NO: 156434 - RNA, 22 nt, synthetic construct
  source 1..22: mol_type = other RNA
ttccccttgccaaggcttgctt

SEQ ID NO: 156435 - RNA, 22 nt, synthetic construct
  source 1..22: mol_type = other RNA
ttcccctttctttggttttgac

SEQ ID NO: 156436 - RNA, 22 nt, synthetic construct
  source 1..22: mol_type = other RNA
ttcccgctacacaagtattaac

SEQ ID NO: 156437 - RNA, 22 nt, synthetic construct
  source 1..22: mol_type = other RNA
ttcccggattggaaaactaggt

SEQ ID NO: 156438 - RNA, 22 nt, synthetic construct
  source 1..22: mol_type = other RNA
ttccctaaagagaatcttaaaa

SEQ ID NO: 156439 - RNA, 22 nt, synthetic construct
  source 1..22: mol_type = other RNA
ttccctacattgccttcaagtt

SEQ ID NO: 156440 - RNA, 22 nt, synthetic construct
  source 1..22: mol_type = other RNA
ttccctactcactgaaaccctc

SEQ ID NO: 156441 - RNA, 22 nt, synthetic construct
  source 1..22: mol_type = other RNA
ttccctagcccagcacttccat

SEQ ID NO: 156442 - RNA, 22 nt, synthetic construct
  source 1..22: mol_type = other RNA
ttccctcagaatttgaggtctt

SEQ ID NO: 156443 - RNA, 22 nt, synthetic construct
  source 1..22: mol_type = other RNA
ttccctcagcaaaagcaattat

SEQ ID NO: 156444 - RNA, 22 nt, synthetic construct
  source 1..22: mol_type = other RNA
ttccctcctttttatcaccctt

SEQ ID NO: 156445 - RNA, 22 nt, synthetic construct
  source 1..22: mol_type = other RNA
ttccctctacaaaaggaggaac

SEQ ID NO: 156446 - RNA, 22 nt, synthetic construct
  source 1..22: mol_type = other RNA
ttccctctcagtggtgcttttg

SEQ ID NO: 156447 - RNA, 22 nt, synthetic construct
  source 1..22: mol_type = other RNA
ttccctctgagagaagtcagac

SEQ ID NO: 156448 - RNA, 22 nt, synthetic construct
  source 1..22: mol_type = other RNA
ttccctctggccttctatattt

SEQ ID NO: 156449 - RNA, 22 nt, synthetic construct
  source 1..22: mol_type = other RNA
ttccctcttcaatattttggaa

SEQ ID NO: 156450 - RNA, 22 nt, synthetic construct
  source 1..22: mol_type = other RNA
ttccctctttctcaacttcctg

SEQ ID NO: 156451 - RNA, 22 nt, synthetic construct
  source 1..22: mol_type = other RNA
ttccctgaacaatgattttctt

SEQ ID NO: 156452 - RNA, 22 nt, synthetic construct
  source 1..22: mol_type = other RNA
ttccctgcatacactcatttcc

SEQ ID NO: 156453 - RNA, 22 nt, synthetic construct
  source 1..22: mol_type = other RNA
ttccctgcttcatctggaccag

SEQ ID NO: 156454 - RNA, 22 nt, synthetic construct
  source 1..22: mol_type = other RNA
ttccctggggaataagatttta

SEQ ID NO: 156455 - RNA, 22 nt, synthetic construct
  source 1..22: mol_type = other RNA
ttccctgtagagatttttatca

SEQ ID NO: 156456 - RNA, 22 nt, synthetic construct
  source 1..22: mol_type = other RNA
ttccctgtctgggaagttatgt

SEQ ID NO: 156457 - RNA, 22 nt, synthetic construct
  source 1..22: mol_type = other RNA
ttccctgtctgtgatgtagagg

SEQ ID NO: 156458 - RNA, 22 nt, synthetic construct
  source 1..22: mol_type = other RNA
ttccctgtgtatgtgtagtcag

SEQ ID NO: 156459 - RNA, 22 nt, synthetic construct
  source 1..22: mol_type = other RNA
ttcccttaaaaggaactaattt

SEQ ID NO: 156460 - RNA, 22 nt, synthetic construct
  source 1..22: mol_type = other RNA
ttcccttaacctttttcttttc

SEQ ID NO: 156461 - RNA, 22 nt, synthetic construct
  source 1..22: mol_type = other RNA
ttcccttaatgttgacatcttg

SEQ ID NO: 156462 - RNA, 22 nt, synthetic construct
  source 1..22: mol_type = other RNA
ttcccttagctctcatgtcaga

SEQ ID NO: 156463 - RNA, 22 nt, synthetic construct
  source 1..22: mol_type = other RNA
ttcccttcagtgtagtcagaca

SEQ ID NO: 156464 - RNA, 22 nt, synthetic construct
  source 1..22: mol_type = other RNA
ttcccttctcgaagtggtgctt

SEQ ID NO: 156465 - RNA, 22 nt, synthetic construct
  source 1..22: mol_type = other RNA
ttcccttctgctcggctctgtc

SEQ ID NO: 156466 - RNA, 22 nt, synthetic construct
  source 1..22: mol_type = other RNA
ttcccttcttaaatgtgaatta

SEQ ID NO: 156467 - RNA, 22 nt, synthetic construct
  source 1..22: mol_type = other RNA
ttcccttgtgcacctcgggttc

SEQ ID NO: 156468 - RNA, 22 nt, synthetic construct
  source 1..22: mol_type = other RNA
ttcccttttggatgcagatttc

SEQ ID NO: 156469 - RNA, 22 nt, synthetic construct
  source 1..22: mol_type = other RNA
ttcccttttgtagctaatatct

SEQ ID NO: 156470 - RNA, 22 nt, synthetic construct
  source 1..22: mol_type = other RNA
ttccgacctgtagattgggctt

SEQ ID NO: 156471 - RNA, 22 nt, synthetic construct
  source 1..22: mol_type = other RNA
ttccgatgataccttcttgaga

SEQ ID NO: 156472 - RNA, 22 nt, synthetic construct
  source 1..22: mol_type = other RNA
ttccgatttctcggccgggcgc

SEQ ID NO: 156473 - RNA, 22 nt, synthetic construct
  source 1..22: mol_type = other RNA
ttccgattttacttactagttg

SEQ ID NO: 156474 - RNA, 22 nt, synthetic construct
  source 1..22: mol_type = other RNA
ttccgcctcagcctcccaaaga

SEQ ID NO: 156475 - RNA, 22 nt, synthetic construct
  source 1..22: mol_type = other RNA
ttccgcgtttattagaactaga

SEQ ID NO: 156476 - RNA, 22 nt, synthetic construct
  source 1..22: mol_type = other RNA
ttccgctaaacattttattagg

SEQ ID NO: 156477 - RNA, 22 nt, synthetic construct
  source 1..22: mol_type = other RNA
ttccgctctggttttaaagaaa

SEQ ID NO: 156478 - RNA, 22 nt, synthetic construct
  source 1..22: mol_type = other RNA
ttccgggacttggaagtgaagt

SEQ ID NO: 156479 - RNA, 22 nt, synthetic construct
  source 1..22: mol_type = other RNA
ttccgggatcctgtccaggcgc

SEQ ID NO: 156480 - RNA, 22 nt, synthetic construct
  source 1..22: mol_type = other RNA
ttccggttctcaggagcctagt

SEQ ID NO: 156481 - RNA, 22 nt, synthetic construct
  source 1..22: mol_type = other RNA
ttccggttgtatagcagtaaaa

SEQ ID NO: 156482 - RNA, 22 nt, synthetic construct
  source 1..22: mol_type = other RNA
ttccgtatccagtggttttttg

SEQ ID NO: 156483 - RNA, 22 nt, synthetic construct
  source 1..22: mol_type = other RNA
ttccgtctagccacttcctatt

SEQ ID NO: 156484 - RNA, 22 nt, synthetic construct
  source 1..22: mol_type = other RNA
ttccgtctcaagattgtgtgat

SEQ ID NO: 156485 - RNA, 22 nt, synthetic construct
  source 1..22: mol_type = other RNA
ttccgtggaaggccttctcctc

SEQ ID NO: 156486 - RNA, 22 nt, synthetic construct
  source 1..22: mol_type = other RNA
ttccgtgtgacaaaaagtaggg

SEQ ID NO: 156487 - RNA, 22 nt, synthetic construct
  source 1..22: mol_type = other RNA
ttccgttgctgcatagtactcc

SEQ ID NO: 156488 - RNA, 22 nt, synthetic construct
  source 1..22: mol_type = other RNA
ttccgttttgcaagatgcataa

SEQ ID NO: 156489 - RNA, 22 nt, synthetic construct
  source 1..22: mol_type = other RNA
ttcctaaaactccccatgcagg

SEQ ID NO: 156490 - RNA, 22 nt, synthetic construct
  source 1..22: mol_type = other RNA
ttcctaaacctgctacgaatga

SEQ ID NO: 156491 - RNA, 22 nt, synthetic construct
  source 1..22: mol_type = other RNA
ttcctaaagagagtgacagctg

SEQ ID NO: 156492 - RNA, 22 nt, synthetic construct
  source 1..22: mol_type = other RNA
ttcctaaccactgttatctggg

SEQ ID NO: 156493 - RNA, 22 nt, synthetic construct
  source 1..22: mol_type = other RNA
ttcctaactcaagagttacttc

SEQ ID NO: 156494 - RNA, 22 nt, synthetic construct
  source 1..22: mol_type = other RNA
ttcctaactggtctcctttcta

SEQ ID NO: 156495 - RNA, 22 nt, synthetic construct
  source 1..22: mol_type = other RNA
ttcctaagaaagggtgtgtgaa

SEQ ID NO: 156496 - RNA, 22 nt, synthetic construct
  source 1..22: mol_type = other RNA
ttcctaatctaacatgttacaa

SEQ ID NO: 156497 - RNA, 22 nt, synthetic construct
  source 1..22: mol_type = other RNA
ttcctacacatatctttaggtg

SEQ ID NO: 156498 - RNA, 22 nt, synthetic construct
  source 1..22: mol_type = other RNA
ttcctacatactgcactctcaa

SEQ ID NO: 156499 - RNA, 22 nt, synthetic construct
  source 1..22: mol_type = other RNA
ttcctacccaagcttaggtcag

SEQ ID NO: 156500 - RNA, 22 nt, synthetic construct
  source 1..22: mol_type = other RNA
ttcctaccctgaggatataacg

SEQ ID NO: 156501 - RNA, 22 nt, synthetic construct
  source 1..22: mol_type = other RNA
ttcctaccctgccttccttggg

SEQ ID NO: 156502 - RNA, 22 nt, synthetic construct
  source 1..22: mol_type = other RNA
ttcctactaacaagaaagggta

SEQ ID NO: 156503 - RNA, 22 nt, synthetic construct
  source 1..22: mol_type = other RNA
ttcctactttcttcaaccatac

SEQ ID NO: 156504 - RNA, 22 nt, synthetic construct
  source 1..22: mol_type = other RNA
ttcctagactgccaggtaggga

SEQ ID NO: 156505 - RNA, 22 nt, synthetic construct
  source 1..22: mol_type = other RNA
ttcctagattccctctggcctt

SEQ ID NO: 156506 - RNA, 22 nt, synthetic construct
  source 1..22: mol_type = other RNA
ttcctatcagaagcacaccaag

SEQ ID NO: 156507 - RNA, 22 nt, synthetic construct
  source 1..22: mol_type = other RNA
ttcctatgaaaatttagcttct

SEQ ID NO: 156508 - RNA, 22 nt, synthetic construct
  source 1..22: mol_type = other RNA
ttcctattcacactgctcctgc

SEQ ID NO: 156509 - RNA, 22 nt, synthetic construct
  source 1..22: mol_type = other RNA
ttcctattttataatgggcaat

SEQ ID NO: 156510 - RNA, 22 nt, synthetic construct
  source 1..22: mol_type = other RNA
ttcctcaggatctacattaaaa

SEQ ID NO: 156511 - RNA, 22 nt, synthetic construct
  source 1..22: mol_type = other RNA
ttcctcatccctcatatcagtt

SEQ ID NO: 156512 - RNA, 22 nt, synthetic construct
  source 1..22: mol_type = other RNA
ttcctcatgtccatagttaatg

SEQ ID NO: 156513 - RNA, 22 nt, synthetic construct
  source 1..22: mol_type = other RNA
ttcctccctggagaggcaaagg

SEQ ID NO: 156514 - RNA, 22 nt, synthetic construct
  source 1..22: mol_type = other RNA
ttcctcccttcagcctgtgtca

SEQ ID NO: 156515 - RNA, 22 nt, synthetic construct
  source 1..22: mol_type = other RNA
ttcctcctctggacattatcct

SEQ ID NO: 156516 - RNA, 22 nt, synthetic construct
  source 1..22: mol_type = other RNA
ttcctccttctgctcactttgg

SEQ ID NO: 156517 - RNA, 22 nt, synthetic construct
  source 1..22: mol_type = other RNA
ttcctccttttgtagagggaat

SEQ ID NO: 156518 - RNA, 22 nt, synthetic construct
  source 1..22: mol_type = other RNA
ttcctcggtctacggacgcagg

SEQ ID NO: 156519 - RNA, 22 nt, synthetic construct
  source 1..22: mol_type = other RNA
ttcctcgttttcaacaaaggtt

SEQ ID NO: 156520 - RNA, 22 nt, synthetic construct
  source 1..22: mol_type = other RNA
ttcctctcttaaatccgagaca

SEQ ID NO: 156521 - RNA, 22 nt, synthetic construct
  source 1..22: mol_type = other RNA
ttcctctcttggaatgtgcacc

SEQ ID NO: 156522 - RNA, 22 nt, synthetic construct
  source 1..22: mol_type = other RNA
ttcctctggctgacctggtact

SEQ ID NO: 156523 - RNA, 22 nt, synthetic construct
  source 1..22: mol_type = other RNA
ttcctcttcctcatccctcata

SEQ ID NO: 156524 - RNA, 22 nt, synthetic construct
  source 1..22: mol_type = other RNA
ttcctgaaatgaaccaaacttg

SEQ ID NO: 156525 - RNA, 22 nt, synthetic construct
  source 1..22: mol_type = other RNA
ttcctgaagtctttggtgatcc

SEQ ID NO: 156526 - RNA, 22 nt, synthetic construct
  source 1..22: mol_type = other RNA
ttcctgacctctgcagttagca

SEQ ID NO: 156527 - RNA, 22 nt, synthetic construct
  source 1..22: mol_type = other RNA
ttcctgataaggggctatcttt

SEQ ID NO: 156528 - RNA, 22 nt, synthetic construct
  source 1..22: mol_type = other RNA
ttcctgatcacaccctcctacc

SEQ ID NO: 156529 - RNA, 22 nt, synthetic construct
  source 1..22: mol_type = other RNA
ttcctgatcagcaccctcaaat

SEQ ID NO: 156530 - RNA, 22 nt, synthetic construct
  source 1..22: mol_type = other RNA
ttcctgatggacattctgcttc

SEQ ID NO: 156531 - RNA, 22 nt, synthetic construct
  source 1..22: mol_type = other RNA
ttcctgcacatgcacaaggtca

SEQ ID NO: 156532 - RNA, 22 nt, synthetic construct
  source 1..22: mol_type = other RNA
ttcctgcccctccactccacaa

SEQ ID NO: 156533 - RNA, 22 nt, synthetic construct
  source 1..22: mol_type = other RNA
ttcctgcctcagccccctgagt

SEQ ID NO: 156534 - RNA, 22 nt, synthetic construct
  source 1..22: mol_type = other RNA
ttcctgctgtcgtttatgcatt

SEQ ID NO: 156535 - RNA, 22 nt, synthetic construct
  source 1..22: mol_type = other RNA
ttcctgcttcccccaaagaagg

SEQ ID NO: 156536 - RNA, 22 nt, synthetic construct
  source 1..22: mol_type = other RNA
ttcctggaaaacttctctggag

SEQ ID NO: 156537 - RNA, 22 nt, synthetic construct
  source 1..22: mol_type = other RNA
ttcctggactgtgatgactgta

SEQ ID NO: 156538 - RNA, 22 nt, synthetic construct
  source 1..22: mol_type = other RNA
ttcctggctctagcccagcttc

SEQ ID NO: 156539 - RNA, 22 nt, synthetic construct
  source 1..22: mol_type = other RNA
ttcctgggttctcccttctatt

SEQ ID NO: 156540 - RNA, 22 nt, synthetic construct
  source 1..22: mol_type = other RNA
ttcctgtatatctccttttaag

SEQ ID NO: 156541 - RNA, 22 nt, synthetic construct
  source 1..22: mol_type = other RNA
ttcctgtcttggacccatgccc

SEQ ID NO: 156542 - RNA, 22 nt, synthetic construct
  source 1..22: mol_type = other RNA
ttcctgtgatttatgtggcatt

SEQ ID NO: 156543 - RNA, 22 nt, synthetic construct
  source 1..22: mol_type = other RNA
ttcctgttccgggatcctgtcc

SEQ ID NO: 156544 - RNA, 22 nt, synthetic construct
  source 1..22: mol_type = other RNA
ttcctgttctttgttagtttat

SEQ ID NO: 156545 - RNA, 22 nt, synthetic construct
  source 1..22: mol_type = other RNA
ttcctgttgctttaacctctgg

SEQ ID NO: 156546 - RNA, 22 nt, synthetic construct
  source 1..22: mol_type = other RNA
ttcctgttttagtggctcacag

SEQ ID NO: 156547 - RNA, 22 nt, synthetic construct
  source 1..22: mol_type = other RNA
ttccttaagcacagactgtgcc

SEQ ID NO: 156548 - RNA, 22 nt, synthetic construct
  source 1..22: mol_type = other RNA
ttccttaagccatttcaggttt

SEQ ID NO: 156549 - RNA, 22 nt, synthetic construct
  source 1..22: mol_type = other RNA
ttccttaccagtgcttgcagcc

SEQ ID NO: 156550 - RNA, 22 nt, synthetic construct
  source 1..22: mol_type = other RNA
ttccttacctttatctttggat

SEQ ID NO: 156551 - RNA, 22 nt, synthetic construct
  source 1..22: mol_type = other RNA
ttccttatagtattacctccca

SEQ ID NO: 156552 - RNA, 22 nt, synthetic construct
  source 1..22: mol_type = other RNA
ttccttatccattcatctctcg

SEQ ID NO: 156553 - RNA, 22 nt, synthetic construct
  source 1..22: mol_type = other RNA
ttccttatccgataaagggtct

SEQ ID NO: 156554 - RNA, 22 nt, synthetic construct
  source 1..22: mol_type = other RNA
ttccttatggatatctggcctg

SEQ ID NO: 156555 - RNA, 22 nt, synthetic construct
  source 1..22: mol_type = other RNA
ttccttattgagaagcagaaaa

SEQ ID NO: 156556 - RNA, 22 nt, synthetic construct
  source 1..22: mol_type = other RNA
ttccttcatgtcccctgtccaa

SEQ ID NO: 156557 - RNA, 22 nt, synthetic construct
  source 1..22: mol_type = other RNA
ttccttccagatgttttacaca

SEQ ID NO: 156558 - RNA, 22 nt, synthetic construct
  source 1..22: mol_type = other RNA
ttccttccagtttatatgccta

SEQ ID NO: 156559 - RNA, 22 nt, synthetic construct
  source 1..22: mol_type = other RNA
ttccttcccctttctttggttt

SEQ ID NO: 156560 - RNA, 22 nt, synthetic construct
  source 1..22: mol_type = other RNA
ttccttccgacctgtagattgg

SEQ ID NO: 156561 - RNA, 22 nt, synthetic construct
  source 1..22: mol_type = other RNA
ttccttcctacacatatcttta

SEQ ID NO: 156562 - RNA, 22 nt, synthetic construct
  source 1..22: mol_type = other RNA
ttccttccttgctcaggagtaa

SEQ ID NO: 156563 - RNA, 22 nt, synthetic construct
  source 1..22: mol_type = other RNA
ttccttcctttgatgacttaca

SEQ ID NO: 156564 - RNA, 22 nt, synthetic construct
  source 1..22: mol_type = other RNA
ttccttctcttatactagtaga

SEQ ID NO: 156565 - RNA, 22 nt, synthetic construct
  source 1..22: mol_type = other RNA
ttccttcttaagacatttggga

SEQ ID NO: 156566 - RNA, 22 nt, synthetic construct
  source 1..22: mol_type = other RNA
ttccttcttcacacattaacta

SEQ ID NO: 156567 - RNA, 22 nt, synthetic construct
  source 1..22: mol_type = other RNA
ttccttctttgggggaagcagg

SEQ ID NO: 156568 - RNA, 22 nt, synthetic construct
  source 1..22: mol_type = other RNA
ttccttgatcagcttcctaccc

SEQ ID NO: 156569 - RNA, 22 nt, synthetic construct
  source 1..22: mol_type = other RNA
ttccttgctatgtaatctcatg

SEQ ID NO: 156570 - RNA, 22 nt, synthetic construct
  source 1..22: mol_type = other RNA
ttccttgctcaggagtaactgc

SEQ ID NO: 156571 - RNA, 22 nt, synthetic construct
  source 1..22: mol_type = other RNA
ttccttgcttgtcttgaatagc

SEQ ID NO: 156572 - RNA, 22 nt, synthetic construct
  source 1..22: mol_type = other RNA
ttccttggagaagagttctgaa

SEQ ID NO: 156573 - RNA, 22 nt, synthetic construct
  source 1..22: mol_type = other RNA
ttccttgggcacactccccagt

SEQ ID NO: 156574 - RNA, 22 nt, synthetic construct
  source 1..22: mol_type = other RNA
ttccttgtcctaaaattccttc

SEQ ID NO: 156575 - RNA, 22 nt, synthetic construct
  source 1..22: mol_type = other RNA
ttccttgtgtcttaaattcaaa

SEQ ID NO: 156576 - RNA, 22 nt, synthetic construct
  source 1..22: mol_type = other RNA
ttcctttaacgtatctgggaaa

SEQ ID NO: 156577 - RNA, 22 nt, synthetic construct
  source 1..22: mol_type = other RNA
ttcctttcaaagagacctgatt

SEQ ID NO: 156578 - RNA, 22 nt, synthetic construct
  source 1..22: mol_type = other RNA
ttcctttcagtcggttcttcac

SEQ ID NO: 156579 - RNA, 22 nt, synthetic construct
  source 1..22: mol_type = other RNA
ttcctttctaggcatctatttc

SEQ ID NO: 156580 - RNA, 22 nt, synthetic construct
  source 1..22: mol_type = other RNA
ttcctttgatgacttacagata

SEQ ID NO: 156581 - RNA, 22 nt, synthetic construct
  source 1..22: mol_type = other RNA
ttcctttgcctaagtctcagga

SEQ ID NO: 156582 - RNA, 22 nt, synthetic construct
  source 1..22: mol_type = other RNA
ttcctttgcctttcactttgat

SEQ ID NO: 156583 - RNA, 22 nt, synthetic construct
  source 1..22: mol_type = other RNA
ttccttttaagggaaacactca

SEQ ID NO: 156584 - RNA, 22 nt, synthetic construct
  source 1..22: mol_type = other RNA
ttccttttcgagactgagtaat

SEQ ID NO: 156585 - RNA, 22 nt, synthetic construct
  source 1..22: mol_type = other RNA
ttccttttttatgtgctttctc

SEQ ID NO: 156586 - RNA, 22 nt, synthetic construct
  source 1..22: mol_type = other RNA
ttcgaaaatgggccaaagactt

SEQ ID NO: 156587 - RNA, 22 nt, synthetic construct
  source 1..22: mol_type = other RNA
ttcgaaagttcagatagaatta

SEQ ID NO: 156588 - RNA, 22 nt, synthetic construct
  source 1..22: mol_type = other RNA
ttcgaaataatcattgttaggt

SEQ ID NO: 156589 - RNA, 22 nt, synthetic construct
  source 1..22: mol_type = other RNA
ttcgaactaaggaaagctcagg

SEQ ID NO: 156590 - RNA, 22 nt, synthetic construct
  source 1..22: mol_type = other RNA
ttcgaagcaaaacatatgtcag

SEQ ID NO: 156591 - RNA, 22 nt, synthetic construct
  source 1..22: mol_type = other RNA
ttcgaagcttattaaaatgaac

SEQ ID NO: 156592 - RNA, 22 nt, synthetic construct
  source 1..22: mol_type = other RNA
ttcgaagtgggaagcaaaggat

SEQ ID NO: 156593 - RNA, 22 nt, synthetic construct
  source 1..22: mol_type = other RNA
ttcgaattagattgttttgttg

SEQ ID NO: 156594 - RNA, 22 nt, synthetic construct
  source 1..22: mol_type = other RNA
ttcgaattatgctaacatgaac

SEQ ID NO: 156595 - RNA, 22 nt, synthetic construct
  source 1..22: mol_type = other RNA
ttcgacagtcccttgcctgaca

SEQ ID NO: 156596 - RNA, 22 nt, synthetic construct
  source 1..22: mol_type = other RNA
ttcgaccaagttactagaagca

SEQ ID NO: 156597 - RNA, 22 nt, synthetic construct
  source 1..22: mol_type = other RNA
ttcgagaagggaagtaaagatc

SEQ ID NO: 156598 - RNA, 22 nt, synthetic construct
  source 1..22: mol_type = other RNA
ttcgagactgagtaatattcca

SEQ ID NO: 156599 - RNA, 22 nt, synthetic construct
  source 1..22: mol_type = other RNA
ttcgaggcatctagttaccact

SEQ ID NO: 156600 - RNA, 22 nt, synthetic construct
  source 1..22: mol_type = other RNA
ttcgagggggctgagtatgggt

SEQ ID NO: 156601 - RNA, 22 nt, synthetic construct
  source 1..22: mol_type = other RNA
ttcgaggtcgcaccctgagcat

SEQ ID NO: 156602 - RNA, 22 nt, synthetic construct
  source 1..22: mol_type = other RNA
ttcgagttctgggagttcatta

SEQ ID NO: 156603 - RNA, 22 nt, synthetic construct
  source 1..22: mol_type = other RNA
ttcgattaaaataacacgcaga

SEQ ID NO: 156604 - RNA, 22 nt, synthetic construct
  source 1..22: mol_type = other RNA
ttcgcaaagcaacatgctaagt

SEQ ID NO: 156605 - RNA, 22 nt, synthetic construct
  source 1..22: mol_type = other RNA
ttcgcaaagtaaaaagcactat

SEQ ID NO: 156606 - RNA, 22 nt, synthetic construct
  source 1..22: mol_type = other RNA
ttcgcagggtgaaacttgaata

SEQ ID NO: 156607 - RNA, 22 nt, synthetic construct
  source 1..22: mol_type = other RNA
ttcgcataaccaaattatttca

SEQ ID NO: 156608 - RNA, 22 nt, synthetic construct
  source 1..22: mol_type = other RNA
ttcgcatcattcaaatgatatt

SEQ ID NO: 156609 - RNA, 22 nt, synthetic construct
  source 1..22: mol_type = other RNA
ttcgcattgctaattcattgta

SEQ ID NO: 156610 - RNA, 22 nt, synthetic construct
  source 1..22: mol_type = other RNA
ttcgcctagataagaaaatgtg

SEQ ID NO: 156611 - RNA, 22 nt, synthetic construct
  source 1..22: mol_type = other RNA
ttcgccttctcagaaggacacc

SEQ ID NO: 156612 - RNA, 22 nt, synthetic construct
  source 1..22: mol_type = other RNA
ttcgcctttctcgcagcgggga

SEQ ID NO: 156613 - RNA, 22 nt, synthetic construct
  source 1..22: mol_type = other RNA
ttcgcctttgttgccaggtgga

SEQ ID NO: 156614 - RNA, 22 nt, synthetic construct
  source 1..22: mol_type = other RNA
ttcgcgcgcggcagggatgctg

SEQ ID NO: 156615 - RNA, 22 nt, synthetic construct
  source 1..22: mol_type = other RNA
ttcgcgggcaccttccctactc

SEQ ID NO: 156616 - RNA, 22 nt, synthetic construct
  source 1..22: mol_type = other RNA
ttcgctaatctcaatcagggcc

SEQ ID NO: 156617 - RNA, 22 nt, synthetic construct
  source 1..22: mol_type = other RNA
ttcgctatcagtagtttgctag

SEQ ID NO: 156618 - RNA, 22 nt, synthetic construct
  source 1..22: mol_type = other RNA
ttcgcttttggagctataattt

SEQ ID NO: 156619 - RNA, 22 nt, synthetic construct
  source 1..22: mol_type = other RNA
ttcggatatttactaagaagtg

SEQ ID NO: 156620 - RNA, 22 nt, synthetic construct
  source 1..22: mol_type = other RNA
ttcggccaagatctgtttttca

SEQ ID NO: 156621 - RNA, 22 nt, synthetic construct
  source 1..22: mol_type = other RNA
ttcggctctgtgctgagatggt

SEQ ID NO: 156622 - RNA, 22 nt, synthetic construct
  source 1..22: mol_type = other RNA
ttcgggggagagcactggtttc

SEQ ID NO: 156623 - RNA, 22 nt, synthetic construct
  source 1..22: mol_type = other RNA
ttcgggtgtcagaattccatca

SEQ ID NO: 156624 - RNA, 22 nt, synthetic construct
  source 1..22: mol_type = other RNA
ttcggtggcattaaggacatcc

SEQ ID NO: 156625 - RNA, 22 nt, synthetic construct
  source 1..22: mol_type = other RNA
ttcgtagcaggtttaggaagca

SEQ ID NO: 156626 - RNA, 22 nt, synthetic construct
  source 1..22: mol_type = other RNA
ttcgtatcttttaacagatggt

SEQ ID NO: 156627 - RNA, 22 nt, synthetic construct
  source 1..22: mol_type = other RNA
ttcgtatggaagatgggacttc

SEQ ID NO: 156628 - RNA, 22 nt, synthetic construct
  source 1..22: mol_type = other RNA
ttcgtcaaggggagaggcctca

SEQ ID NO: 156629 - RNA, 22 nt, synthetic construct
  source 1..22: mol_type = other RNA
ttcgtcatctataaggtaatga

SEQ ID NO: 156630 - RNA, 22 nt, synthetic construct
  source 1..22: mol_type = other RNA
ttcgtccctaaacactgtagtt

SEQ ID NO: 156631 - RNA, 22 nt, synthetic construct
  source 1..22: mol_type = other RNA
ttcgtgagggtttcagtgagta

SEQ ID NO: 156632 - RNA, 22 nt, synthetic construct
  source 1..22: mol_type = other RNA
ttcgtgtactgaaaccagtgct

SEQ ID NO: 156633 - RNA, 22 nt, synthetic construct
  source 1..22: mol_type = other RNA
ttcgtgtgtggagtggggcacc

SEQ ID NO: 156634 - RNA, 22 nt, synthetic construct
  source 1..22: mol_type = other RNA
ttcgttaatacttgtgtagcgg

SEQ ID NO: 156635 - RNA, 22 nt, synthetic construct
  source 1..22: mol_type = other RNA
ttcgttcaaaacatcatctaat

SEQ ID NO: 156636 - RNA, 22 nt, synthetic construct
  source 1..22: mol_type = other RNA
ttcgttcagtttagtaaatctt

SEQ ID NO: 156637 - RNA, 22 nt, synthetic construct
  source 1..22: mol_type = other RNA
ttcgttccagcagggtaaagtc

SEQ ID NO: 156638 - RNA, 22 nt, synthetic construct
  source 1..22: mol_type = other RNA
ttcgtttgaggcttttcatagt

SEQ ID NO: 156639 - RNA, 22 nt, synthetic construct
  source 1..22: mol_type = other RNA
ttctaaaaacgtgcaaactacc

SEQ ID NO: 156640 - RNA, 22 nt, synthetic construct
  source 1..22: mol_type = other RNA
ttctaaaatcatcacagtatgc

SEQ ID NO: 156641 - RNA, 22 nt, synthetic construct
  source 1..22: mol_type = other RNA
ttctaaacacacgggctgggcg

SEQ ID NO: 156642 - RNA, 22 nt, synthetic construct
  source 1..22: mol_type = other RNA
ttctaaacctgaggtctttaaa

SEQ ID NO: 156643 - RNA, 22 nt, synthetic construct
  source 1..22: mol_type = other RNA
ttctaaaccttaaaagagtgaa

SEQ ID NO: 156644 - RNA, 22 nt, synthetic construct
  source 1..22: mol_type = other RNA
ttctaaactggttttcctgatg

SEQ ID NO: 156645 - RNA, 22 nt, synthetic construct
  source 1..22: mol_type = other RNA
ttctaaagttagaagtatccca

SEQ ID NO: 156646 - RNA, 22 nt, synthetic construct
  source 1..22: mol_type = other RNA
ttctaaatcaacagtgtactag

SEQ ID NO: 156647 - RNA, 22 nt, synthetic construct
  source 1..22: mol_type = other RNA
ttctaaattgaacagcctaaag

SEQ ID NO: 156648 - RNA, 22 nt, synthetic construct
  source 1..22: mol_type = other RNA
ttctaacaagaagctgttttgg

SEQ ID NO: 156649 - RNA, 22 nt, synthetic construct
  source 1..22: mol_type = other RNA
ttctaacattatcttctacctt

SEQ ID NO: 156650 - RNA, 22 nt, synthetic construct
  source 1..22: mol_type = other RNA
ttctaaccctcaaatgccatag

SEQ ID NO: 156651 - RNA, 22 nt, synthetic construct
  source 1..22: mol_type = other RNA
ttctaagagccaaagacattgt

SEQ ID NO: 156652 - RNA, 22 nt, synthetic construct
  source 1..22: mol_type = other RNA
ttctaagccatgtttctcctgc

SEQ ID NO: 156653 - RNA, 22 nt, synthetic construct
  source 1..22: mol_type = other RNA
ttctaagctaagagttttatag

SEQ ID NO: 156654 - RNA, 22 nt, synthetic construct
  source 1..22: mol_type = other RNA
ttctaaggttctgctatgctga

SEQ ID NO: 156655 - RNA, 22 nt, synthetic construct
  source 1..22: mol_type = other RNA
ttctaagtttgccaaagattct

SEQ ID NO: 156656 - RNA, 22 nt, synthetic construct
  source 1..22: mol_type = other RNA
ttctaataaacgcggaatgaag

SEQ ID NO: 156657 - RNA, 22 nt, synthetic construct
  source 1..22: mol_type = other RNA
ttctaataggaagtggctagac

SEQ ID NO: 156658 - RNA, 22 nt, synthetic construct
  source 1..22: mol_type = other RNA
ttctaatcctttgcacacacca

SEQ ID NO: 156659 - RNA, 22 nt, synthetic construct
  source 1..22: mol_type = other RNA
ttctaatgaactcccagaactc

SEQ ID NO: 156660 - RNA, 22 nt, synthetic construct
  source 1..22: mol_type = other RNA
ttctaatgcccattaaaaccat

SEQ ID NO: 156661 - RNA, 22 nt, synthetic construct
  source 1..22: mol_type = other RNA
ttctaatgtgcaaggagagaaa

SEQ ID NO: 156662 - RNA, 22 nt, synthetic construct
  source 1..22: mol_type = other RNA
ttctaattagaaactggtgaac

SEQ ID NO: 156663 - RNA, 22 nt, synthetic construct
  source 1..22: mol_type = other RNA
ttctaattctgacaactgggag

SEQ ID NO: 156664 - RNA, 22 nt, synthetic construct
  source 1..22: mol_type = other RNA
ttctaatttccaagaacccttt

SEQ ID NO: 156665 - RNA, 22 nt, synthetic construct
  source 1..22: mol_type = other RNA
ttctaatttgtgaaccttgaag

SEQ ID NO: 156666 - RNA, 22 nt, synthetic construct
  source 1..22: mol_type = other RNA
ttctacaatggttgaactagtt

SEQ ID NO: 156667 - RNA, 22 nt, synthetic construct
  source 1..22: mol_type = other RNA
ttctacagaaaacccttcatca

SEQ ID NO: 156668 - RNA, 22 nt, synthetic construct
  source 1..22: mol_type = other RNA
ttctacagaatgttcaagtatt

SEQ ID NO: 156669 - RNA, 22 nt, synthetic construct
  source 1..22: mol_type = other RNA
ttctacagtattacacagaaag

SEQ ID NO: 156670 - RNA, 22 nt, synthetic construct
  source 1..22: mol_type = other RNA
ttctacatccccccacccctgc

SEQ ID NO: 156671 - RNA, 22 nt, synthetic construct
  source 1..22: mol_type = other RNA
ttctacccactattgaaagccc

SEQ ID NO: 156672 - RNA, 22 nt, synthetic construct
  source 1..22: mol_type = other RNA
ttctacctggagcctgaggaca

SEQ ID NO: 156673 - RNA, 22 nt, synthetic construct
  source 1..22: mol_type = other RNA
ttctaccttgaaaatgccctta

SEQ ID NO: 156674 - RNA, 22 nt, synthetic construct
  source 1..22: mol_type = other RNA
ttctacctttggctactgtaaa

SEQ ID NO: 156675 - RNA, 22 nt, synthetic construct
  source 1..22: mol_type = other RNA
ttctactaaacattaaggaaga

SEQ ID NO: 156676 - RNA, 22 nt, synthetic construct
  source 1..22: mol_type = other RNA
ttctactagtataagagaagga

SEQ ID NO: 156677 - RNA, 22 nt, synthetic construct
  source 1..22: mol_type = other RNA
ttctactcactgtactactgac

SEQ ID NO: 156678 - RNA, 22 nt, synthetic construct
  source 1..22: mol_type = other RNA
ttctactggggtcttagttctg

SEQ ID NO: 156679 - RNA, 22 nt, synthetic construct
  source 1..22: mol_type = other RNA
ttctactgtgaattcactaatg

SEQ ID NO: 156680 - RNA, 22 nt, synthetic construct
  source 1..22: mol_type = other RNA
ttctagaaaggagggactgaaa

SEQ ID NO: 156681 - RNA, 22 nt, synthetic construct
  source 1..22: mol_type = other RNA
ttctagaatgcatccctcctct

SEQ ID NO: 156682 - RNA, 22 nt, synthetic construct
  source 1..22: mol_type = other RNA
ttctagagatttgctgtataac

SEQ ID NO: 156683 - RNA, 22 nt, synthetic construct
  source 1..22: mol_type = other RNA
ttctagattcatatgctttgag

SEQ ID NO: 156684 - RNA, 22 nt, synthetic construct
  source 1..22: mol_type = other RNA
ttctagccaaagcaagccttgg

SEQ ID NO: 156685 - RNA, 22 nt, synthetic construct
  source 1..22: mol_type = other RNA
ttctagccataatccttagatt

SEQ ID NO: 156686 - RNA, 22 nt, synthetic construct
  source 1..22: mol_type = other RNA
ttctagcctccagaaaaccaga

SEQ ID NO: 156687 - RNA, 22 nt, synthetic construct
  source 1..22: mol_type = other RNA
ttctagctcctgggaaaaggat

SEQ ID NO: 156688 - RNA, 22 nt, synthetic construct
  source 1..22: mol_type = other RNA
ttctagctttcagcactgctat

SEQ ID NO: 156689 - RNA, 22 nt, synthetic construct
  source 1..22: mol_type = other RNA
ttctaggaaccatattagagtg

SEQ ID NO: 156690 - RNA, 22 nt, synthetic construct
  source 1..22: mol_type = other RNA
ttctaggcatctatttccccat

SEQ ID NO: 156691 - RNA, 22 nt, synthetic construct
  source 1..22: mol_type = other RNA
ttctaggccctaaccccagaga

SEQ ID NO: 156692 - RNA, 22 nt, synthetic construct
  source 1..22: mol_type = other RNA
ttctaggtagtttctttgaact

SEQ ID NO: 156693 - RNA, 22 nt, synthetic construct
  source 1..22: mol_type = other RNA
ttctagtaacttggtcgaaaac

SEQ ID NO: 156694 - RNA, 22 nt, synthetic construct
  source 1..22: mol_type = other RNA
ttctagtcacatttgctttact

SEQ ID NO: 156695 - RNA, 22 nt, synthetic construct
  source 1..22: mol_type = other RNA
ttctagtgatgggagatggaca

SEQ ID NO: 156696 - RNA, 22 nt, synthetic construct
  source 1..22: mol_type = other RNA
ttctagttaataaaggtgctaa

SEQ ID NO: 156697 - RNA, 22 nt, synthetic construct
  source 1..22: mol_type = other RNA
ttctagttagtttgttgaccca

SEQ ID NO: 156698 - RNA, 22 nt, synthetic construct
  source 1..22: mol_type = other RNA
ttctagttctaataaacgcgga

SEQ ID NO: 156699 - RNA, 22 nt, synthetic construct
  source 1..22: mol_type = other RNA
ttctagttctagctctgtcttt

SEQ ID NO: 156700 - RNA, 22 nt, synthetic construct
  source 1..22: mol_type = other RNA
ttctagtttgaggtgtacaatt

SEQ ID NO: 156701 - RNA, 22 nt, synthetic construct
  source 1..22: mol_type = other RNA
ttctatacttcatctttcctga

SEQ ID NO: 156702 - RNA, 22 nt, synthetic construct
  source 1..22: mol_type = other RNA
ttctataggtagtacatattca

SEQ ID NO: 156703 - RNA, 22 nt, synthetic construct
  source 1..22: mol_type = other RNA
ttctatagtcattccgctaaac

SEQ ID NO: 156704 - RNA, 22 nt, synthetic construct
  source 1..22: mol_type = other RNA
ttctatagtggctgcaccattt

SEQ ID NO: 156705 - RNA, 22 nt, synthetic construct
  source 1..22: mol_type = other RNA
ttctatcatcaagacagagctc

SEQ ID NO: 156706 - RNA, 22 nt, synthetic construct
  source 1..22: mol_type = other RNA
ttctatccagtgacacctgagg

SEQ ID NO: 156707 - RNA, 22 nt, synthetic construct
  source 1..22: mol_type = other RNA
ttctatctctcagatctgagtt

SEQ ID NO: 156708 - RNA, 22 nt, synthetic construct
  source 1..22: mol_type = other RNA
ttctatctgaacattttagctg

SEQ ID NO: 156709 - RNA, 22 nt, synthetic construct
  source 1..22: mol_type = other RNA
ttctatctgaactttcgaagtg

SEQ ID NO: 156710 - RNA, 22 nt, synthetic construct
  source 1..22: mol_type = other RNA
ttctatgtgacaaacacttttc

SEQ ID NO: 156711 - RNA, 22 nt, synthetic construct
  source 1..22: mol_type = other RNA
ttctattcattaccaggctgga

SEQ ID NO: 156712 - RNA, 22 nt, synthetic construct
  source 1..22: mol_type = other RNA
ttctattccagagaattcagag

SEQ ID NO: 156713 - RNA, 22 nt, synthetic construct
  source 1..22: mol_type = other RNA
ttctattccattgttctctttg

SEQ ID NO: 156714 - RNA, 22 nt, synthetic construct
  source 1..22: mol_type = other RNA
ttctattcccctggatccccca

SEQ ID NO: 156715 - RNA, 22 nt, synthetic construct
  source 1..22: mol_type = other RNA
ttctatttctttccattcaatc

SEQ ID NO: 156716 - RNA, 22 nt, synthetic construct
  source 1..22: mol_type = other RNA
ttctatttttctgcaattggaa

SEQ ID NO: 156717 - RNA, 22 nt, synthetic construct
  source 1..22: mol_type = other RNA
ttctcaaaaatttaagcacaga

SEQ ID NO: 156718 - RNA, 22 nt, synthetic construct
  source 1..22: mol_type = other RNA
ttctcaaacaggatacaaaaag

SEQ ID NO: 156719 - RNA, 22 nt, synthetic construct
  source 1..22: mol_type = other RNA
ttctcaaactgtgtgcttggag

SEQ ID NO: 156720 - RNA, 22 nt, synthetic construct
  source 1..22: mol_type = other RNA
ttctcaaagcccaccagcataa

SEQ ID NO: 156721 - RNA, 22 nt, synthetic construct
  source 1..22: mol_type = other RNA
ttctcaaatgaacaggttcttc

SEQ ID NO: 156722 - RNA, 22 nt, synthetic construct
  source 1..22: mol_type = other RNA
ttctcaacactgtgttcttttc

SEQ ID NO: 156723 - RNA, 22 nt, synthetic construct
  source 1..22: mol_type = other RNA
ttctcaacttagccttggtaaa

SEQ ID NO: 156724 - RNA, 22 nt, synthetic construct
  source 1..22: mol_type = other RNA
ttctcaacttcctgttttagtg

SEQ ID NO: 156725 - RNA, 22 nt, synthetic construct
  source 1..22: mol_type = other RNA
ttctcaataaggaaagcacgtt

SEQ ID NO: 156726 - RNA, 22 nt, synthetic construct
  source 1..22: mol_type = other RNA
ttctcaatcccttccccacctt

SEQ ID NO: 156727 - RNA, 22 nt, synthetic construct
  source 1..22: mol_type = other RNA
ttctcaccaacatccacagctt

SEQ ID NO: 156728 - RNA, 22 nt, synthetic construct
  source 1..22: mol_type = other RNA
ttctcagatctgttgcagtccc

SEQ ID NO: 156729 - RNA, 22 nt, synthetic construct
  source 1..22: mol_type = other RNA
ttctcagctatagcttctgagc

SEQ ID NO: 156730 - RNA, 22 nt, synthetic construct
  source 1..22: mol_type = other RNA
ttctcaggagcctagtcatcca

SEQ ID NO: 156731 - RNA, 22 nt, synthetic construct
  source 1..22: mol_type = other RNA
ttctcagggcctgcttttggaa

SEQ ID NO: 156732 - RNA, 22 nt, synthetic construct
  source 1..22: mol_type = other RNA
ttctcaggggtaaaggggatgg

SEQ ID NO: 156733 - RNA, 22 nt, synthetic construct
  source 1..22: mol_type = other RNA
ttctcagtatcctttcaaggta

SEQ ID NO: 156734 - RNA, 22 nt, synthetic construct
  source 1..22: mol_type = other RNA
ttctcagttgcagcatgctcac

SEQ ID NO: 156735 - RNA, 22 nt, synthetic construct
  source 1..22: mol_type = other RNA
ttctcatactttgtcaggcatg

SEQ ID NO: 156736 - RNA, 22 nt, synthetic construct
  source 1..22: mol_type = other RNA
ttctcatagtcttccaaaatat

SEQ ID NO: 156737 - RNA, 22 nt, synthetic construct
  source 1..22: mol_type = other RNA
ttctcatattattttttcccgc

SEQ ID NO: 156738 - RNA, 22 nt, synthetic construct
  source 1..22: mol_type = other RNA
ttctcatctgtcactttcctat

SEQ ID NO: 156739 - RNA, 22 nt, synthetic construct
  source 1..22: mol_type = other RNA
ttctcatgtatgttttagcctt

SEQ ID NO: 156740 - RNA, 22 nt, synthetic construct
  source 1..22: mol_type = other RNA
ttctcattagttatctcttaga

SEQ ID NO: 156741 - RNA, 22 nt, synthetic construct
  source 1..22: mol_type = other RNA
ttctcattcttctctaatgtaa

SEQ ID NO: 156742 - RNA, 22 nt, synthetic construct
  source 1..22: mol_type = other RNA
ttctcatttttcaggggggcca

SEQ ID NO: 156743 - RNA, 22 nt, synthetic construct
  source 1..22: mol_type = other RNA
ttctccaaggaaagtgtgcttg

SEQ ID NO: 156744 - RNA, 22 nt, synthetic construct
  source 1..22: mol_type = other RNA
ttctccacatccttgccaacag

SEQ ID NO: 156745 - RNA, 22 nt, synthetic construct
  source 1..22: mol_type = other RNA
ttctccactttcatgatttggt

SEQ ID NO: 156746 - RNA, 22 nt, synthetic construct
  source 1..22: mol_type = other RNA
ttctccagtcccactgacagtg

SEQ ID NO: 156747 - RNA, 22 nt, synthetic construct
  source 1..22: mol_type = other RNA
ttctccagtgaagtcatctggt

SEQ ID NO: 156748 - RNA, 22 nt, synthetic construct
  source 1..22: mol_type = other RNA
ttctcccaaggttgcctgttca

SEQ ID NO: 156749 - RNA, 22 nt, synthetic construct
  source 1..22: mol_type = other RNA
ttctcccagctgtccaacaagg

SEQ ID NO: 156750 - RNA, 22 nt, synthetic construct
  source 1..22: mol_type = other RNA
ttctcccaggtcagtagtacag

SEQ ID NO: 156751 - RNA, 22 nt, synthetic construct
  source 1..22: mol_type = other RNA
ttctcccagttgtcagaattag

SEQ ID NO: 156752 - RNA, 22 nt, synthetic construct
  source 1..22: mol_type = other RNA
ttctccctcttcgctcttttaa

SEQ ID NO: 156753 - RNA, 22 nt, synthetic construct
  source 1..22: mol_type = other RNA
ttctccctgaaattgtcagaaa

SEQ ID NO: 156754 - RNA, 22 nt, synthetic construct
  source 1..22: mol_type = other RNA
ttctcccttctattccattgtt

SEQ ID NO: 156755 - RNA, 22 nt, synthetic construct
  source 1..22: mol_type = other RNA
ttctcctaagtcttcttctaag

SEQ ID NO: 156756 - RNA, 22 nt, synthetic construct
  source 1..22: mol_type = other RNA
ttctcctccaacccattccagg

SEQ ID NO: 156757 - RNA, 22 nt, synthetic construct
  source 1..22: mol_type = other RNA
ttctcctgcatggggagtttta

SEQ ID NO: 156758 - RNA, 22 nt, synthetic construct
  source 1..22: mol_type = other RNA
ttctcctgtgtgcatgctccca

SEQ ID NO: 156759 - RNA, 22 nt, synthetic construct
  source 1..22: mol_type = other RNA
ttctccttctgcaggctgaact

SEQ ID NO: 156760 - RNA, 22 nt, synthetic construct
  source 1..22: mol_type = other RNA
ttctccttctggaagatttcta

SEQ ID NO: 156761 - RNA, 22 nt, synthetic construct
  source 1..22: mol_type = other RNA
ttctcgaagtggtgcttgaact

SEQ ID NO: 156762 - RNA, 22 nt, synthetic construct
  source 1..22: mol_type = other RNA
ttctcgacacacaatccaagtt

SEQ ID NO: 156763 - RNA, 22 nt, synthetic construct
  source 1..22: mol_type = other RNA
ttctcgcagcggggatgctcag

SEQ ID NO: 156764 - RNA, 22 nt, synthetic construct
  source 1..22: mol_type = other RNA
ttctcgtgcatgtctgcaggag

SEQ ID NO: 156765 - RNA, 22 nt, synthetic construct
  source 1..22: mol_type = other RNA
ttctcgtgtgagctctagcctt

SEQ ID NO: 156766 - RNA, 22 nt, synthetic construct
  source 1..22: mol_type = other RNA
ttctcgttcatgttcaaggtgt

SEQ ID NO: 156767 - RNA, 22 nt, synthetic construct
  source 1..22: mol_type = other RNA
ttctctaatagctagtgatgtt

SEQ ID NO: 156768 - RNA, 22 nt, synthetic construct
  source 1..22: mol_type = other RNA
ttctctaatgtaaacagcatac

SEQ ID NO: 156769 - RNA, 22 nt, synthetic construct
  source 1..22: mol_type = other RNA
ttctctacagttaacaatactg

SEQ ID NO: 156770 - RNA, 22 nt, synthetic construct
  source 1..22: mol_type = other RNA
ttctctacatctggatcctgtc

SEQ ID NO: 156771 - RNA, 22 nt, synthetic construct
  source 1..22: mol_type = other RNA
ttctctactctgcctcagttga

SEQ ID NO: 156772 - RNA, 22 nt, synthetic construct
  source 1..22: mol_type = other RNA
ttctctagttgcacggtgaaga

SEQ ID NO: 156773 - RNA, 22 nt, synthetic construct
  source 1..22: mol_type = other RNA
ttctctcagagggaaactgttt

SEQ ID NO: 156774 - RNA, 22 nt, synthetic construct
  source 1..22: mol_type = other RNA
ttctctcatgttgggtaaaaat

SEQ ID NO: 156775 - RNA, 22 nt, synthetic construct
  source 1..22: mol_type = other RNA
ttctctccaaggtacaattaca

SEQ ID NO: 156776 - RNA, 22 nt, synthetic construct
  source 1..22: mol_type = other RNA
ttctctccttgcacattagaat

SEQ ID NO: 156777 - RNA, 22 nt, synthetic construct
  source 1..22: mol_type = other RNA
ttctctcctttgaggtaagaac

SEQ ID NO: 156778 - RNA, 22 nt, synthetic construct
  source 1..22: mol_type = other RNA
ttctctctcaactggcccctcc

SEQ ID NO: 156779 - RNA, 22 nt, synthetic construct
  source 1..22: mol_type = other RNA
ttctctctccctgccctgtgaa

SEQ ID NO: 156780 - RNA, 22 nt, synthetic construct
  source 1..22: mol_type = other RNA
ttctctctctgcttcactaact

SEQ ID NO: 156781 - RNA, 22 nt, synthetic construct
  source 1..22: mol_type = other RNA
ttctctcttccaaataatcccg

SEQ ID NO: 156782 - RNA, 22 nt, synthetic construct
  source 1..22: mol_type = other RNA
ttctctgccccgggcctggtta

SEQ ID NO: 156783 - RNA, 22 nt, synthetic construct
  source 1..22: mol_type = other RNA
ttctctgctgctgaaaaagata

SEQ ID NO: 156784 - RNA, 22 nt, synthetic construct
  source 1..22: mol_type = other RNA
ttctctgctttttcttggtggt

SEQ ID NO: 156785 - RNA, 22 nt, synthetic construct
  source 1..22: mol_type = other RNA
ttctctggaatagaagagcagt

SEQ ID NO: 156786 - RNA, 22 nt, synthetic construct
  source 1..22: mol_type = other RNA
ttctctggagcaagcatgagta

SEQ ID NO: 156787 - RNA, 22 nt, synthetic construct
  source 1..22: mol_type = other RNA
ttctctgtctctgttgcccagt

SEQ ID NO: 156788 - RNA, 22 nt, synthetic construct
  source 1..22: mol_type = other RNA
ttctctgtgtggtttgcctttt

SEQ ID NO: 156789 - RNA, 22 nt, synthetic construct
  source 1..22: mol_type = other RNA
ttctcttatactagtagaaagc

SEQ ID NO: 156790 - RNA, 22 nt, synthetic construct
  source 1..22: mol_type = other RNA
ttctcttctggatagcattatc

SEQ ID NO: 156791 - RNA, 22 nt, synthetic construct
  source 1..22: mol_type = other RNA
ttctctttaaagctgaactcct

SEQ ID NO: 156792 - RNA, 22 nt, synthetic construct
  source 1..22: mol_type = other RNA
ttctctttagggaagatagtac

SEQ ID NO: 156793 - RNA, 22 nt, synthetic construct
  source 1..22: mol_type = other RNA
ttctctttcagccatcccagct

SEQ ID NO: 156794 - RNA, 22 nt, synthetic construct
  source 1..22: mol_type = other RNA
ttctctttctgaaattctcatt

SEQ ID NO: 156795 - RNA, 22 nt, synthetic construct
  source 1..22: mol_type = other RNA
ttctctttgtttatccttgcac

SEQ ID NO: 156796 - RNA, 22 nt, synthetic construct
  source 1..22: mol_type = other RNA
ttctcttttcctcgttttcaac

SEQ ID NO: 156797 - RNA, 22 nt, synthetic construct
  source 1..22: mol_type = other RNA
ttctctttttgacagatgagac

SEQ ID NO: 156798 - RNA, 22 nt, synthetic construct
  source 1..22: mol_type = other RNA
ttctgaaaaatggttttatggt

SEQ ID NO: 156799 - RNA, 22 nt, synthetic construct
  source 1..22: mol_type = other RNA
ttctgaactcaaaagtgaatca

SEQ ID NO: 156800 - RNA, 22 nt, synthetic construct
  source 1..22: mol_type = other RNA
ttctgaactttcaacctaacat

SEQ ID NO: 156801 - RNA, 22 nt, synthetic construct
  source 1..22: mol_type = other RNA
ttctgaagaaattatctgtggg

SEQ ID NO: 156802 - RNA, 22 nt, synthetic construct
  source 1..22: mol_type = other RNA
ttctgaagaggctttctgtgta

SEQ ID NO: 156803 - RNA, 22 nt, synthetic construct
  source 1..22: mol_type = other RNA
ttctgaaggcactaacaaaggg

SEQ ID NO: 156804 - RNA, 22 nt, synthetic construct
  source 1..22: mol_type = other RNA
ttctgaaggctcagcccctcat

SEQ ID NO: 156805 - RNA, 22 nt, synthetic construct
  source 1..22: mol_type = other RNA
ttctgaaggtgcctgccataga

SEQ ID NO: 156806 - RNA, 22 nt, synthetic construct
  source 1..22: mol_type = other RNA
ttctgaattgagatgtactgga

SEQ ID NO: 156807 - RNA, 22 nt, synthetic construct
  source 1..22: mol_type = other RNA
ttctgacaactgggagaatggc

SEQ ID NO: 156808 - RNA, 22 nt, synthetic construct
  source 1..22: mol_type = other RNA
ttctgacaatttcagggagaat

SEQ ID NO: 156809 - RNA, 22 nt, synthetic construct
  source 1..22: mol_type = other RNA
ttctgacacccgaagaggacga

SEQ ID NO: 156810 - RNA, 22 nt, synthetic construct
  source 1..22: mol_type = other RNA
ttctgacacccgacccactagt

SEQ ID NO: 156811 - RNA, 22 nt, synthetic construct
  source 1..22: mol_type = other RNA
ttctgacaggtggtatgggaga

SEQ ID NO: 156812 - RNA, 22 nt, synthetic construct
  source 1..22: mol_type = other RNA
ttctgaccaactatttcactaa

SEQ ID NO: 156813 - RNA, 22 nt, synthetic construct
  source 1..22: mol_type = other RNA
ttctgacccagagcctaatgtg

SEQ ID NO: 156814 - RNA, 22 nt, synthetic construct
  source 1..22: mol_type = other RNA
ttctgaccctttattcaaagat

SEQ ID NO: 156815 - RNA, 22 nt, synthetic construct
  source 1..22: mol_type = other RNA
ttctgacctaaagttttaagaa

SEQ ID NO: 156816 - RNA, 22 nt, synthetic construct
  source 1..22: mol_type = other RNA
ttctgactctgtgcttgtgctt

SEQ ID NO: 156817 - RNA, 22 nt, synthetic construct
  source 1..22: mol_type = other RNA
ttctgacttagtgagggaggcc

SEQ ID NO: 156818 - RNA, 22 nt, synthetic construct
  source 1..22: mol_type = other RNA
ttctgagaaggcgaaatgtgaa

SEQ ID NO: 156819 - RNA, 22 nt, synthetic construct
  source 1..22: mol_type = other RNA
ttctgagagtattgccaggttt

SEQ ID NO: 156820 - RNA, 22 nt, synthetic construct
  source 1..22: mol_type = other RNA
ttctgagcaactactatttcgc

SEQ ID NO: 156821 - RNA, 22 nt, synthetic construct
  source 1..22: mol_type = other RNA
ttctgagcagtgtttcctagat

SEQ ID NO: 156822 - RNA, 22 nt, synthetic construct
  source 1..22: mol_type = other RNA
ttctgagccagagtttcactct

SEQ ID NO: 156823 - RNA, 22 nt, synthetic construct
  source 1..22: mol_type = other RNA
ttctgagctgttaatggttaga

SEQ ID NO: 156824 - RNA, 22 nt, synthetic construct
  source 1..22: mol_type = other RNA
ttctgaggagctgagaccacag

SEQ ID NO: 156825 - RNA, 22 nt, synthetic construct
  source 1..22: mol_type = other RNA
ttctgaggcctcctgccttcct

SEQ ID NO: 156826 - RNA, 22 nt, synthetic construct
  source 1..22: mol_type = other RNA
ttctgagggaaattatttccag

SEQ ID NO: 156827 - RNA, 22 nt, synthetic construct
  source 1..22: mol_type = other RNA
ttctgaggtggagttctgctct

SEQ ID NO: 156828 - RNA, 22 nt, synthetic construct
  source 1..22: mol_type = other RNA
ttctgagtatattctgtgaatt

SEQ ID NO: 156829 - RNA, 22 nt, synthetic construct
  source 1..22: mol_type = other RNA
ttctgagtgttacttgaaatca

SEQ ID NO: 156830 - RNA, 22 nt, synthetic construct
  source 1..22: mol_type = other RNA
ttctgatagcttgacaaaaggc

SEQ ID NO: 156831 - RNA, 22 nt, synthetic construct
  source 1..22: mol_type = other RNA
ttctgataggaatatcgtcttt

SEQ ID NO: 156832 - RNA, 22 nt, synthetic construct
  source 1..22: mol_type = other RNA
ttctgatatcctgtaaacctgg

SEQ ID NO: 156833 - RNA, 22 nt, synthetic construct
  source 1..22: mol_type = other RNA
ttctgatcacagaagtgttttg

SEQ ID NO: 156834 - RNA, 22 nt, synthetic construct
  source 1..22: mol_type = other RNA
ttctgatgcacaagccttgaaa

SEQ ID NO: 156835 - RNA, 22 nt, synthetic construct
  source 1..22: mol_type = other RNA
ttctgattgcccattataaaat

SEQ ID NO: 156836 - RNA, 22 nt, synthetic construct
  source 1..22: mol_type = other RNA
ttctgatttcaaagttaatagc

SEQ ID NO: 156837 - RNA, 22 nt, synthetic construct
  source 1..22: mol_type = other RNA
ttctgatttgctggctcagtct

SEQ ID NO: 156838 - RNA, 22 nt, synthetic construct
  source 1..22: mol_type = other RNA
ttctgcaagttgctatccagtc

SEQ ID NO: 156839 - RNA, 22 nt, synthetic construct
  source 1..22: mol_type = other RNA
ttctgcaattggaagactatca

SEQ ID NO: 156840 - RNA, 22 nt, synthetic construct
  source 1..22: mol_type = other RNA
ttctgcaggctgaactgctgac

SEQ ID NO: 156841 - RNA, 22 nt, synthetic construct
  source 1..22: mol_type = other RNA
ttctgcagtgaacatgggaatg

SEQ ID NO: 156842 - RNA, 22 nt, synthetic construct
  source 1..22: mol_type = other RNA
ttctgcagtttgtgttttcact

SEQ ID NO: 156843 - RNA, 22 nt, synthetic construct
  source 1..22: mol_type = other RNA
ttctgcatacttagctaatttc

SEQ ID NO: 156844 - RNA, 22 nt, synthetic construct
  source 1..22: mol_type = other RNA
ttctgcatagagatcttgtgta

SEQ ID NO: 156845 - RNA, 22 nt, synthetic construct
  source 1..22: mol_type = other RNA
ttctgcatcttttgagggtatc

SEQ ID NO: 156846 - RNA, 22 nt, synthetic construct
  source 1..22: mol_type = other RNA
ttctgcatttggtttgcaaaaa

SEQ ID NO: 156847 - RNA, 22 nt, synthetic construct
  source 1..22: mol_type = other RNA
ttctgccacattcaacaacatg

SEQ ID NO: 156848 - RNA, 22 nt, synthetic construct
  source 1..22: mol_type = other RNA
ttctgcctaatctctaggctta

SEQ ID NO: 156849 - RNA, 22 nt, synthetic construct
  source 1..22: mol_type = other RNA
ttctgcctcccgggtttaagcg

SEQ ID NO: 156850 - RNA, 22 nt, synthetic construct
  source 1..22: mol_type = other RNA
ttctgcctgcagactgcaggtc

SEQ ID NO: 156851 - RNA, 22 nt, synthetic construct
  source 1..22: mol_type = other RNA
ttctgccttcaatgtttggtag

SEQ ID NO: 156852 - RNA, 22 nt, synthetic construct
  source 1..22: mol_type = other RNA
ttctgccttgacctcccaaagg

SEQ ID NO: 156853 - RNA, 22 nt, synthetic construct
  source 1..22: mol_type = other RNA
ttctgccttgaggtgattcaga

SEQ ID NO: 156854 - RNA, 22 nt, synthetic construct
  source 1..22: mol_type = other RNA
ttctgcgcaattgcagccagag

SEQ ID NO: 156855 - RNA, 22 nt, synthetic construct
  source 1..22: mol_type = other RNA
ttctgcgtgttattttaatcga

SEQ ID NO: 156856 - RNA, 22 nt, synthetic construct
  source 1..22: mol_type = other RNA
ttctgctaataaaaacatatgc

SEQ ID NO: 156857 - RNA, 22 nt, synthetic construct
  source 1..22: mol_type = other RNA
ttctgctactagcaagctaata

SEQ ID NO: 156858 - RNA, 22 nt, synthetic construct
  source 1..22: mol_type = other RNA
ttctgctatgaaatgtggtttt

SEQ ID NO: 156859 - RNA, 22 nt, synthetic construct
  source 1..22: mol_type = other RNA
ttctgctatgctgaaaggcatg

SEQ ID NO: 156860 - RNA, 22 nt, synthetic construct
  source 1..22: mol_type = other RNA
ttctgctattctctttctgaaa

SEQ ID NO: 156861 - RNA, 22 nt, synthetic construct
  source 1..22: mol_type = other RNA
ttctgctcactttgggattagc

SEQ ID NO: 156862 - RNA, 22 nt, synthetic construct
  source 1..22: mol_type = other RNA
ttctgctcggctctgtcaccct

SEQ ID NO: 156863 - RNA, 22 nt, synthetic construct
  source 1..22: mol_type = other RNA
ttctgctcttgtcgcccaggct

SEQ ID NO: 156864 - RNA, 22 nt, synthetic construct
  source 1..22: mol_type = other RNA
ttctgctgggcccactctcccc

SEQ ID NO: 156865 - RNA, 22 nt, synthetic construct
  source 1..22: mol_type = other RNA
ttctgctgttgatggacgtttg

SEQ ID NO: 156866 - RNA, 22 nt, synthetic construct
  source 1..22: mol_type = other RNA
ttctgcttaaagcctctcaaca

SEQ ID NO: 156867 - RNA, 22 nt, synthetic construct
  source 1..22: mol_type = other RNA
ttctgcttagtcttctcagatc

SEQ ID NO: 156868 - RNA, 22 nt, synthetic construct
  source 1..22: mol_type = other RNA
ttctgcttattatatgcctaga

SEQ ID NO: 156869 - RNA, 22 nt, synthetic construct
  source 1..22: mol_type = other RNA
ttctgcttccacatttctaatt

SEQ ID NO: 156870 - RNA, 22 nt, synthetic construct
  source 1..22: mol_type = other RNA
ttctgcttccttgctatgtaat

SEQ ID NO: 156871 - RNA, 22 nt, synthetic construct
  source 1..22: mol_type = other RNA
ttctgcttctcaataaggaaag

SEQ ID NO: 156872 - RNA, 22 nt, synthetic construct
  source 1..22: mol_type = other RNA
ttctgcttgaatgtgcctacat

SEQ ID NO: 156873 - RNA, 22 nt, synthetic construct
  source 1..22: mol_type = other RNA
ttctggaaactcaaacccaaat

SEQ ID NO: 156874 - RNA, 22 nt, synthetic construct
  source 1..22: mol_type = other RNA
ttctggaaagttcaaatgaggc

SEQ ID NO: 156875 - RNA, 22 nt, synthetic construct
  source 1..22: mol_type = other RNA
ttctggaagatttctactgggg

SEQ ID NO: 156876 - RNA, 22 nt, synthetic construct
  source 1..22: mol_type = other RNA
ttctggaagtttcctgcacatg

SEQ ID NO: 156877 - RNA, 22 nt, synthetic construct
  source 1..22: mol_type = other RNA
ttctggaccacaatcttacccc

SEQ ID NO: 156878 - RNA, 22 nt, synthetic construct
  source 1..22: mol_type = other RNA
ttctggaggctagaagtcccag

SEQ ID NO: 156879 - RNA, 22 nt, synthetic construct
  source 1..22: mol_type = other RNA
ttctggagtgttttcttcatgg

SEQ ID NO: 156880 - RNA, 22 nt, synthetic construct
  source 1..22: mol_type = other RNA
ttctggatagcattatcccttt

SEQ ID NO: 156881 - RNA, 22 nt, synthetic construct
  source 1..22: mol_type = other RNA
ttctggatgtgtatgatcaaag

SEQ ID NO: 156882 - RNA, 22 nt, synthetic construct
  source 1..22: mol_type = other RNA
ttctggatgttaattagatatg

SEQ ID NO: 156883 - RNA, 22 nt, synthetic construct
  source 1..22: mol_type = other RNA
ttctggccaaatccctgatcaa

SEQ ID NO: 156884 - RNA, 22 nt, synthetic construct
  source 1..22: mol_type = other RNA
ttctgggagttcattagaattc

SEQ ID NO: 156885 - RNA, 22 nt, synthetic construct
  source 1..22: mol_type = other RNA
ttctgggctctctattccaaat

SEQ ID NO: 156886 - RNA, 22 nt, synthetic construct
  source 1..22: mol_type = other RNA
ttctggggatgctgtctatagg

SEQ ID NO: 156887 - RNA, 22 nt, synthetic construct
  source 1..22: mol_type = other RNA
ttctggggctcaagtaagtgaa

SEQ ID NO: 156888 - RNA, 22 nt, synthetic construct
  source 1..22: mol_type = other RNA
ttctggggttcaaaccacctaa

SEQ ID NO: 156889 - RNA, 22 nt, synthetic construct
  source 1..22: mol_type = other RNA
ttctggtgtcgtttatttcttc

SEQ ID NO: 156890 - RNA, 22 nt, synthetic construct
  source 1..22: mol_type = other RNA
ttctggttttctggaggctaga

SEQ ID NO: 156891 - RNA, 22 nt, synthetic construct
  source 1..22: mol_type = other RNA
ttctgtaaacatgaacaagtta

SEQ ID NO: 156892 - RNA, 22 nt, synthetic construct
  source 1..22: mol_type = other RNA
ttctgtaatattaaccaagaac

SEQ ID NO: 156893 - RNA, 22 nt, synthetic construct
  source 1..22: mol_type = other RNA
ttctgtaatgtttgtacttcta

SEQ ID NO: 156894 - RNA, 22 nt, synthetic construct
  source 1..22: mol_type = other RNA
ttctgtacccttacgcgtggat

SEQ ID NO: 156895 - RNA, 22 nt, synthetic construct
  source 1..22: mol_type = other RNA
ttctgtagaatatccaagcaca

SEQ ID NO: 156896 - RNA, 22 nt, synthetic construct
  source 1..22: mol_type = other RNA
ttctgtatcttttcagtccaga

SEQ ID NO: 156897 - RNA, 22 nt, synthetic construct
  source 1..22: mol_type = other RNA
ttctgtcacatagacctgaatg

SEQ ID NO: 156898 - RNA, 22 nt, synthetic construct
  source 1..22: mol_type = other RNA
ttctgtcacatttgaaagaaag

SEQ ID NO: 156899 - RNA, 22 nt, synthetic construct
  source 1..22: mol_type = other RNA
ttctgtcacggtgccctacata

SEQ ID NO: 156900 - RNA, 22 nt, synthetic construct
  source 1..22: mol_type = other RNA
ttctgtcatctgaatcaataag

SEQ ID NO: 156901 - RNA, 22 nt, synthetic construct
  source 1..22: mol_type = other RNA
ttctgtcattctgcagtttgtg

SEQ ID NO: 156902 - RNA, 22 nt, synthetic construct
  source 1..22: mol_type = other RNA
ttctgtccttggattgctaaac

SEQ ID NO: 156903 - RNA, 22 nt, synthetic construct
  source 1..22: mol_type = other RNA
ttctgtctctacaaaaaagtaa

SEQ ID NO: 156904 - RNA, 22 nt, synthetic construct
  source 1..22: mol_type = other RNA
ttctgtgaattgtgacagttct

SEQ ID NO: 156905 - RNA, 22 nt, synthetic construct
  source 1..22: mol_type = other RNA
ttctgtgatcagaagagcacta

SEQ ID NO: 156906 - RNA, 22 nt, synthetic construct
  source 1..22: mol_type = other RNA
ttctgtgccaagcaacttgatc

SEQ ID NO: 156907 - RNA, 22 nt, synthetic construct
  source 1..22: mol_type = other RNA
ttctgtgctagatgctaaacag

SEQ ID NO: 156908 - RNA, 22 nt, synthetic construct
  source 1..22: mol_type = other RNA
ttctgtgcttaaatttttgaga

SEQ ID NO: 156909 - RNA, 22 nt, synthetic construct
  source 1..22: mol_type = other RNA
ttctgtgtaatactgtagaatg

SEQ ID NO: 156910 - RNA, 22 nt, synthetic construct
  source 1..22: mol_type = other RNA
ttctgtgtttatgaatgatgcc

SEQ ID NO: 156911 - RNA, 22 nt, synthetic construct
  source 1..22: mol_type = other RNA
ttctgttaatagataggtcatg

SEQ ID NO: 156912 - RNA, 22 nt, synthetic construct
  source 1..22: mol_type = other RNA
ttctgttaatgtgatatgccac

SEQ ID NO: 156913 - RNA, 22 nt, synthetic construct
  source 1..22: mol_type = other RNA
ttctgttagatggtgctgattt

SEQ ID NO: 156914 - RNA, 22 nt, synthetic construct
  source 1..22: mol_type = other RNA
ttctgttccatcggtctgtatt

SEQ ID NO: 156915 - RNA, 22 nt, synthetic construct
  source 1..22: mol_type = other RNA
ttctgttctagctcctgggaaa

SEQ ID NO: 156916 - RNA, 22 nt, synthetic construct
  source 1..22: mol_type = other RNA
ttctgttctcagtatcctttca

SEQ ID NO: 156917 - RNA, 22 nt, synthetic construct
  source 1..22: mol_type = other RNA
ttctgttgcaaattattttcct

SEQ ID NO: 156918 - RNA, 22 nt, synthetic construct
  source 1..22: mol_type = other RNA
ttctgttgcttaagtcactcca

SEQ ID NO: 156919 - RNA, 22 nt, synthetic construct
  source 1..22: mol_type = other RNA
ttctgttggagagatggtagtc

SEQ ID NO: 156920 - RNA, 22 nt, synthetic construct
  source 1..22: mol_type = other RNA
ttctgtttacccttactaaatt

SEQ ID NO: 156921 - RNA, 22 nt, synthetic construct
  source 1..22: mol_type = other RNA
ttctgtttctgtgaaaaaacaa

SEQ ID NO: 156922 - RNA, 22 nt, synthetic construct
  source 1..22: mol_type = other RNA
ttctgtttggatgaaaaagtac

SEQ ID NO: 156923 - RNA, 22 nt, synthetic construct
  source 1..22: mol_type = other RNA
ttctgtttgtttgttttgagac

SEQ ID NO: 156924 - RNA, 22 nt, synthetic construct
  source 1..22: mol_type = other RNA
ttctgtttttcttagtctagcc

SEQ ID NO: 156925 - RNA, 22 nt, synthetic construct
  source 1..22: mol_type = other RNA
ttcttaaaaatgacaccaaaac

SEQ ID NO: 156926 - RNA, 22 nt, synthetic construct
  source 1..22: mol_type = other RNA
ttcttaaaactttaggtcagaa

SEQ ID NO: 156927 - RNA, 22 nt, synthetic construct
  source 1..22: mol_type = other RNA
ttcttaaactgccaaaccctac

SEQ ID NO: 156928 - RNA, 22 nt, synthetic construct
  source 1..22: mol_type = other RNA
ttcttaaatgtgaattagatgg

SEQ ID NO: 156929 - RNA, 22 nt, synthetic construct
  source 1..22: mol_type = other RNA
ttcttaagacatttgggaatgt

SEQ ID NO: 156930 - RNA, 22 nt, synthetic construct
  source 1..22: mol_type = other RNA
ttcttacacattaggctctggg

SEQ ID NO: 156931 - RNA, 22 nt, synthetic construct
  source 1..22: mol_type = other RNA
ttcttacagtgacatatgccgg

SEQ ID NO: 156932 - RNA, 22 nt, synthetic construct
  source 1..22: mol_type = other RNA
ttcttaccctcacagtcacaaa

SEQ ID NO: 156933 - RNA, 22 nt, synthetic construct
  source 1..22: mol_type = other RNA
ttcttaccctttactcagattc

SEQ ID NO: 156934 - RNA, 22 nt, synthetic construct
  source 1..22: mol_type = other RNA
ttcttacctaagcatcgtgaag

SEQ ID NO: 156935 - RNA, 22 nt, synthetic construct
  source 1..22: mol_type = other RNA
ttcttacctcaaaggagagaag

SEQ ID NO: 156936 - RNA, 22 nt, synthetic construct
  source 1..22: mol_type = other RNA
ttcttaccttctaaaatcatca

SEQ ID NO: 156937 - RNA, 22 nt, synthetic construct
  source 1..22: mol_type = other RNA
ttcttagctatattcacttttg

SEQ ID NO: 156938 - RNA, 22 nt, synthetic construct
  source 1..22: mol_type = other RNA
ttcttaggaagctatggagcac

SEQ ID NO: 156939 - RNA, 22 nt, synthetic construct
  source 1..22: mol_type = other RNA
ttcttaggtttctcatttttca

SEQ ID NO: 156940 - RNA, 22 nt, synthetic construct
  source 1..22: mol_type = other RNA
ttcttagtaaatatccgaaaga

SEQ ID NO: 156941 - RNA, 22 nt, synthetic construct
  source 1..22: mol_type = other RNA
ttcttagtgttcccttcttaaa

SEQ ID NO: 156942 - RNA, 22 nt, synthetic construct
  source 1..22: mol_type = other RNA
ttcttagttccattattccata

SEQ ID NO: 156943 - RNA, 22 nt, synthetic construct
  source 1..22: mol_type = other RNA
ttcttatccctacctaaaaagg

SEQ ID NO: 156944 - RNA, 22 nt, synthetic construct
  source 1..22: mol_type = other RNA
ttcttatctaggcgaaatatct

SEQ ID NO: 156945 - RNA, 22 nt, synthetic construct
  source 1..22: mol_type = other RNA
ttcttatgaggttattcaaaac

SEQ ID NO: 156946 - RNA, 22 nt, synthetic construct
  source 1..22: mol_type = other RNA
ttcttattgattcagatgacag

SEQ ID NO: 156947 - RNA, 22 nt, synthetic construct
  source 1..22: mol_type = other RNA
ttcttattggttatctgtactt

SEQ ID NO: 156948 - RNA, 22 nt, synthetic construct
  source 1..22: mol_type = other RNA
ttcttatttccttccagtttat

SEQ ID NO: 156949 - RNA, 22 nt, synthetic construct
  source 1..22: mol_type = other RNA
ttcttatttgttactgatctgc

SEQ ID NO: 156950 - RNA, 22 nt, synthetic construct
  source 1..22: mol_type = other RNA
ttcttattttttcccagatacg

SEQ ID NO: 156951 - RNA, 22 nt, synthetic construct
  source 1..22: mol_type = other RNA
ttcttcaaaagacatcactaag

SEQ ID NO: 156952 - RNA, 22 nt, synthetic construct
  source 1..22: mol_type = other RNA
ttcttcaaccatacttttcaac

SEQ ID NO: 156953 - RNA, 22 nt, synthetic construct
  source 1..22: mol_type = other RNA
ttcttcaagatactgcactaaa

SEQ ID NO: 156954 - RNA, 22 nt, synthetic construct
  source 1..22: mol_type = other RNA
ttcttcacacattaactatgga

SEQ ID NO: 156955 - RNA, 22 nt, synthetic construct
  source 1..22: mol_type = other RNA
ttcttcaccattccagccattc

SEQ ID NO: 156956 - RNA, 22 nt, synthetic construct
  source 1..22: mol_type = other RNA
ttcttcaccgtgcaactagaga

SEQ ID NO: 156957 - RNA, 22 nt, synthetic construct
  source 1..22: mol_type = other RNA
ttcttcactcttaaaaggagat

SEQ ID NO: 156958 - RNA, 22 nt, synthetic construct
  source 1..22: mol_type = other RNA
ttcttcagaagaaattacttct

SEQ ID NO: 156959 - RNA, 22 nt, synthetic construct
  source 1..22: mol_type = other RNA
ttcttcagcaaggaccattagc

SEQ ID NO: 156960 - RNA, 22 nt, synthetic construct
  source 1..22: mol_type = other RNA
ttcttcatcagtccctgtgttt

SEQ ID NO: 156961 - RNA, 22 nt, synthetic construct
  source 1..22: mol_type = other RNA
ttcttcatggactagactgcct

SEQ ID NO: 156962 - RNA, 22 nt, synthetic construct
  source 1..22: mol_type = other RNA
ttcttccactagtgggatcaaa

SEQ ID NO: 156963 - RNA, 22 nt, synthetic construct
  source 1..22: mol_type = other RNA
ttcttccagcctggtaatgaat

SEQ ID NO: 156964 - RNA, 22 nt, synthetic construct
  source 1..22: mol_type = other RNA
ttcttcccatctcactcaccta

SEQ ID NO: 156965 - RNA, 22 nt, synthetic construct
  source 1..22: mol_type = other RNA
ttcttcctgtcttggacccatg

SEQ ID NO: 156966 - RNA, 22 nt, synthetic construct
  source 1..22: mol_type = other RNA
ttcttccttaatgtttagtaga

SEQ ID NO: 156967 - RNA, 22 nt, synthetic construct
  source 1..22: mol_type = other RNA
ttcttctaagctaagagtttta

SEQ ID NO: 156968 - RNA, 22 nt, synthetic construct
  source 1..22: mol_type = other RNA
ttcttctaataggaagtggcta

SEQ ID NO: 156969 - RNA, 22 nt, synthetic construct
  source 1..22: mol_type = other RNA
ttcttctagtcacatttgcttt

SEQ ID NO: 156970 - RNA, 22 nt, synthetic construct
  source 1..22: mol_type = other RNA
ttcttctccctcttcgctcttt

SEQ ID NO: 156971 - RNA, 22 nt, synthetic construct
  source 1..22: mol_type = other RNA
ttcttctctaatgtaaacagca

SEQ ID NO: 156972 - RNA, 22 nt, synthetic construct
  source 1..22: mol_type = other RNA
ttcttctgaagaaattatctgt

SEQ ID NO: 156973 - RNA, 22 nt, synthetic construct
  source 1..22: mol_type = other RNA
ttcttctgtaatattaaccaag

SEQ ID NO: 156974 - RNA, 22 nt, synthetic construct
  source 1..22: mol_type = other RNA
ttcttctgttggagagatggta

SEQ ID NO: 156975 - RNA, 22 nt, synthetic construct
  source 1..22: mol_type = other RNA
ttcttcttgttttgttctcgtt

SEQ ID NO: 156976 - RNA, 22 nt, synthetic construct
  source 1..22: mol_type = other RNA
ttcttctttggctcaatggtta

SEQ ID NO: 156977 - RNA, 22 nt, synthetic construct
  source 1..22: mol_type = other RNA
ttcttgaatctctctatccacc

SEQ ID NO: 156978 - RNA, 22 nt, synthetic construct
  source 1..22: mol_type = other RNA
ttcttgacatgattgaggactt

SEQ ID NO: 156979 - RNA, 22 nt, synthetic construct
  source 1..22: mol_type = other RNA
ttcttgacctcaaatgatccac

SEQ ID NO: 156980 - RNA, 22 nt, synthetic construct
  source 1..22: mol_type = other RNA
ttcttgacctcagtggtagtta

SEQ ID NO: 156981 - RNA, 22 nt, synthetic construct
  source 1..22: mol_type = other RNA
ttcttgagagtctcttaagacc

SEQ ID NO: 156982 - RNA, 22 nt, synthetic construct
  source 1..22: mol_type = other RNA
ttcttgctttgctgccccagct

SEQ ID NO: 156983 - RNA, 22 nt, synthetic construct
  source 1..22: mol_type = other RNA
ttcttggaaattagaaatgtgg

SEQ ID NO: 156984 - RNA, 22 nt, synthetic construct
  source 1..22: mol_type = other RNA
ttcttggagtaaacctgcaatt

SEQ ID NO: 156985 - RNA, 22 nt, synthetic construct
  source 1..22: mol_type = other RNA
ttcttggggctctaatgcaaga

SEQ ID NO: 156986 - RNA, 22 nt, synthetic construct
  source 1..22: mol_type = other RNA
ttcttgggtgaataacccatat

SEQ ID NO: 156987 - RNA, 22 nt, synthetic construct
  source 1..22: mol_type = other RNA
ttcttggtctgcagactcttgt

SEQ ID NO: 156988 - RNA, 22 nt, synthetic construct
  source 1..22: mol_type = other RNA
ttcttggtggtaactgatgtga

SEQ ID NO: 156989 - RNA, 22 nt, synthetic construct
  source 1..22: mol_type = other RNA
ttcttggttaatattacagaag

SEQ ID NO: 156990 - RNA, 22 nt, synthetic construct
  source 1..22: mol_type = other RNA
ttcttgtcatgaatgaatgttg

SEQ ID NO: 156991 - RNA, 22 nt, synthetic construct
  source 1..22: mol_type = other RNA
ttcttgtgggtattttgttgtt

SEQ ID NO: 156992 - RNA, 22 nt, synthetic construct
  source 1..22: mol_type = other RNA
ttcttgttaagcattttccggt

SEQ ID NO: 156993 - RNA, 22 nt, synthetic construct
  source 1..22: mol_type = other RNA
ttcttgttagtaggaaaaccat

SEQ ID NO: 156994 - RNA, 22 nt, synthetic construct
  source 1..22: mol_type = other RNA
ttcttgttttcttgagatggag

SEQ ID NO: 156995 - RNA, 22 nt, synthetic construct
  source 1..22: mol_type = other RNA
ttcttgttttgttctcgttcat

SEQ ID NO: 156996 - RNA, 22 nt, synthetic construct
  source 1..22: mol_type = other RNA
ttctttaaaaccagagcggaat

SEQ ID NO: 156997 - RNA, 22 nt, synthetic construct
  source 1..22: mol_type = other RNA
ttctttaaaactgctgagtctt

SEQ ID NO: 156998 - RNA, 22 nt, synthetic construct
  source 1..22: mol_type = other RNA
ttctttcaaatgtgacagaaca

SEQ ID NO: 156999 - RNA, 22 nt, synthetic construct
  source 1..22: mol_type = other RNA
ttctttccattcaatccttgta

SEQ ID NO: 157000 - RNA, 22 nt, synthetic construct
  source 1..22: mol_type = other RNA
ttctttcgcatcattcaaatga

SEQ ID NO: 157001 - RNA, 22 nt, synthetic construct
  source 1..22: mol_type = other RNA
ttctttcggatatttactaaga

SEQ ID NO: 157002 - RNA, 22 nt, synthetic construct
  source 1..22: mol_type = other RNA
ttctttctctttcagccatccc

SEQ ID NO: 157003 - RNA, 22 nt, synthetic construct
  source 1..22: mol_type = other RNA
ttctttctttcaaatgtgacag

SEQ ID NO: 157004 - RNA, 22 nt, synthetic construct
  source 1..22: mol_type = other RNA
ttctttgagtagttcatgttag

SEQ ID NO: 157005 - RNA, 22 nt, synthetic construct
  source 1..22: mol_type = other RNA
ttctttggagctgtatttttgc

SEQ ID NO: 157006 - RNA, 22 nt, synthetic construct
  source 1..22: mol_type = other RNA
ttctttggctcaatggttaaga

SEQ ID NO: 157007 - RNA, 22 nt, synthetic construct
  source 1..22: mol_type = other RNA
ttctttggctgttagccttgcc

SEQ ID NO: 157008 - RNA, 22 nt, synthetic construct
  source 1..22: mol_type = other RNA
ttctttgggggaagcaggaact

SEQ ID NO: 157009 - RNA, 22 nt, synthetic construct
  source 1..22: mol_type = other RNA
ttctttggttttgactcagtac

SEQ ID NO: 157010 - RNA, 22 nt, synthetic construct
  source 1..22: mol_type = other RNA
ttcttttaaagacctcaggttt

SEQ ID NO: 157011 - RNA, 22 nt, synthetic construct
  source 1..22: mol_type = other RNA
ttcttttaaatgccaatttggg

SEQ ID NO: 157012 - RNA, 22 nt, synthetic construct
  source 1..22: mol_type = other RNA
ttcttttacttgcttggtttca

SEQ ID NO: 157013 - RNA, 22 nt, synthetic construct
  source 1..22: mol_type = other RNA
ttcttttagagtaactgtcatc

SEQ ID NO: 157014 - RNA, 22 nt, synthetic construct
  source 1..22: mol_type = other RNA
ttcttttcacataaatttgcca

SEQ ID NO: 157015 - RNA, 22 nt, synthetic construct
  source 1..22: mol_type = other RNA
ttcttttcactctaatatggtt

SEQ ID NO: 157016 - RNA, 22 nt, synthetic construct
  source 1..22: mol_type = other RNA
ttcttttccaaccaagcccaac

SEQ ID NO: 157017 - RNA, 22 nt, synthetic construct
  source 1..22: mol_type = other RNA
ttcttttccttcttaagacatt

SEQ ID NO: 157018 - RNA, 22 nt, synthetic construct
  source 1..22: mol_type = other RNA
ttcttttgctgtatacccaggt

SEQ ID NO: 157019 - RNA, 22 nt, synthetic construct
  source 1..22: mol_type = other RNA
ttcttttgtgggtaaattaagt

SEQ ID NO: 157020 - RNA, 22 nt, synthetic construct
  source 1..22: mol_type = other RNA
ttcttttgttgcctgtagtttt

SEQ ID NO: 157021 - RNA, 22 nt, synthetic construct
  source 1..22: mol_type = other RNA
ttctttttaaacaggtgtaaga

SEQ ID NO: 157022 - RNA, 22 nt, synthetic construct
  source 1..22: mol_type = other RNA
ttctttttactcatgtctacct

SEQ ID NO: 157023 - RNA, 22 nt, synthetic construct
  source 1..22: mol_type = other RNA
ttctttttactcgagggtagct

SEQ ID NO: 157024 - RNA, 22 nt, synthetic construct
  source 1..22: mol_type = other RNA
ttctttttagtaagaggtatca

SEQ ID NO: 157025 - RNA, 22 nt, synthetic construct
  source 1..22: mol_type = other RNA
ttctttttctagtttgaggtgt

SEQ ID NO: 157026 - RNA, 22 nt, synthetic construct
  source 1..22: mol_type = other RNA
ttctttttcttgctttgctgcc

SEQ ID NO: 157027 - RNA, 22 nt, synthetic construct
  source 1..22: mol_type = other RNA
ttctttttgttttctccttctg

SEQ ID NO: 157028 - RNA, 22 nt, synthetic construct
  source 1..22: mol_type = other RNA
ttgaaaaaacttcccttagctc

SEQ ID NO: 157029 - RNA, 22 nt, synthetic construct
  source 1..22: mol_type = other RNA
ttgaaaaacagatcttggccga

SEQ ID NO: 157030 - RNA, 22 nt, synthetic construct
  source 1..22: mol_type = other RNA
ttgaaaaaggaaagtaactgtt

SEQ ID NO: 157031 - RNA, 22 nt, synthetic construct
  source 1..22: mol_type = other RNA
ttgaaaaatgtcaattttcccc

SEQ ID NO: 157032 - RNA, 22 nt, synthetic construct
  source 1..22: mol_type = other RNA
ttgaaaacatgttttgttgttg

SEQ ID NO: 157033 - RNA, 22 nt, synthetic construct
  source 1..22: mol_type = other RNA
ttgaaaacgaggaaaagagaac

SEQ ID NO: 157034 - RNA, 22 nt, synthetic construct
  source 1..22: mol_type = other RNA
ttgaaaactcaactgcctctac

SEQ ID NO: 157035 - RNA, 22 nt, synthetic construct
  source 1..22: mol_type = other RNA
ttgaaaagaacaacatggtaga

SEQ ID NO: 157036 - RNA, 22 nt, synthetic construct
  source 1..22: mol_type = other RNA
ttgaaaagctcaaaaatactca

SEQ ID NO: 157037 - RNA, 22 nt, synthetic construct
  source 1..22: mol_type = other RNA
ttgaaaagtatggttgaagaaa

SEQ ID NO: 157038 - RNA, 22 nt, synthetic construct
  source 1..22: mol_type = other RNA
ttgaaaagtgtttgtcacatag

SEQ ID NO: 157039 - RNA, 22 nt, synthetic construct
  source 1..22: mol_type = other RNA
ttgaaaatgcccttatttaatg

SEQ ID NO: 157040 - RNA, 22 nt, synthetic construct
  source 1..22: mol_type = other RNA
ttgaaaatggtttaggctgtct

SEQ ID NO: 157041 - RNA, 22 nt, synthetic construct
  source 1..22: mol_type = other RNA
ttgaaacaatactttagacatg

SEQ ID NO: 157042 - RNA, 22 nt, synthetic construct
  source 1..22: mol_type = other RNA
ttgaaacctgccatggtgttaa

SEQ ID NO: 157043 - RNA, 22 nt, synthetic construct
  source 1..22: mol_type = other RNA
ttgaaacgatgcattccagatt

SEQ ID NO: 157044 - RNA, 22 nt, synthetic construct
  source 1..22: mol_type = other RNA
ttgaaactcaatgttggttagt

SEQ ID NO: 157045 - RNA, 22 nt, synthetic construct
  source 1..22: mol_type = other RNA
ttgaaactgagcatcccagagg

SEQ ID NO: 157046 - RNA, 22 nt, synthetic construct
  source 1..22: mol_type = other RNA
ttgaaagaaagaaggccatttg

SEQ ID NO: 157047 - RNA, 22 nt, synthetic construct
  source 1..22: mol_type = other RNA
ttgaaagatcatttagtaagtg

SEQ ID NO: 157048 - RNA, 22 nt, synthetic construct
  source 1..22: mol_type = other RNA
ttgaaagcccttgagtattttt

SEQ ID NO: 157049 - RNA, 22 nt, synthetic construct
  source 1..22: mol_type = other RNA
ttgaaaggaatccggctttatg

SEQ ID NO: 157050 - RNA, 22 nt, synthetic construct
  source 1..22: mol_type = other RNA
ttgaaaggatactgagaacaga

SEQ ID NO: 157051 - RNA, 22 nt, synthetic construct
  source 1..22: mol_type = other RNA
ttgaaaggggccaggtgtggag

SEQ ID NO: 157052 - RNA, 22 nt, synthetic construct
  source 1..22: mol_type = other RNA
ttgaaagttcagaataccagag

SEQ ID NO: 157053 - RNA, 22 nt, synthetic construct
  source 1..22: mol_type = other RNA
ttgaaatcagaacttgacaagt

SEQ ID NO: 157054 - RNA, 22 nt, synthetic construct
  source 1..22: mol_type = other RNA
ttgaaatcaggaagtatgagtc

SEQ ID NO: 157055 - RNA, 22 nt, synthetic construct
  source 1..22: mol_type = other RNA
ttgaaatttaaagacgttcaga

SEQ ID NO: 157056 - RNA, 22 nt, synthetic construct
  source 1..22: mol_type = other RNA
ttgaacaagagcgtcgtacctt

SEQ ID NO: 157057 - RNA, 22 nt, synthetic construct
  source 1..22: mol_type = other RNA
ttgaacactctgcaattttaaa

SEQ ID NO: 157058 - RNA, 22 nt, synthetic construct
  source 1..22: mol_type = other RNA
ttgaacagcctaaagtccacag

SEQ ID NO: 157059 - RNA, 22 nt, synthetic construct
  source 1..22: mol_type = other RNA
ttgaacatcacccagctcgacc

SEQ ID NO: 157060 - RNA, 22 nt, synthetic construct
  source 1..22: mol_type = other RNA
ttgaacatgaacgagaacaaaa

SEQ ID NO: 157061 - RNA, 22 nt, synthetic construct
  source 1..22: mol_type = other RNA
ttgaacattctgtagaagtaaa

SEQ ID NO: 157062 - RNA, 22 nt, synthetic construct
  source 1..22: mol_type = other RNA
ttgaacccactgagcatttata

SEQ ID NO: 157063 - RNA, 22 nt, synthetic construct
  source 1..22: mol_type = other RNA
ttgaaccccagaaggttaacta

SEQ ID NO: 157064 - RNA, 22 nt, synthetic construct
  source 1..22: mol_type = other RNA
ttgaacccgaggtgcacaaggg

SEQ ID NO: 157065 - RNA, 22 nt, synthetic construct
  source 1..22: mol_type = other RNA
ttgaacctgaaaaacggaggtt

SEQ ID NO: 157066 - RNA, 22 nt, synthetic construct
  source 1..22: mol_type = other RNA
ttgaaccttcctcttcctcatc

SEQ ID NO: 157067 - RNA, 22 nt, synthetic construct
  source 1..22: mol_type = other RNA
ttgaacgaatgaaaacacaaca

SEQ ID NO: 157068 - RNA, 22 nt, synthetic construct
  source 1..22: mol_type = other RNA
ttgaactaagtgtgaagattaa

SEQ ID NO: 157069 - RNA, 22 nt, synthetic construct
  source 1..22: mol_type = other RNA
ttgaactcactggccagcatta

SEQ ID NO: 157070 - RNA, 22 nt, synthetic construct
  source 1..22: mol_type = other RNA
ttgaactgctggtctggaatgt

SEQ ID NO: 157071 - RNA, 22 nt, synthetic construct
  source 1..22: mol_type = other RNA
ttgaactgggacttctagcctc

SEQ ID NO: 157072 - RNA, 22 nt, synthetic construct
  source 1..22: mol_type = other RNA
ttgaactgttacttgactattt

SEQ ID NO: 157073 - RNA, 22 nt, synthetic construct
  source 1..22: mol_type = other RNA
ttgaacttatataaatgctcag

SEQ ID NO: 157074 - RNA, 22 nt, synthetic construct
  source 1..22: mol_type = other RNA
ttgaactttccagaagtaactc

SEQ ID NO: 157075 - RNA, 22 nt, synthetic construct
  source 1..22: mol_type = other RNA
ttgaagaaaccaagagcataga

SEQ ID NO: 157076 - RNA, 22 nt, synthetic construct
  source 1..22: mol_type = other RNA
ttgaagaaagtaggaattaaac

SEQ ID NO: 157077 - RNA, 22 nt, synthetic construct
  source 1..22: mol_type = other RNA
ttgaagaaagttttgcagttgg

SEQ ID NO: 157078 - RNA, 22 nt, synthetic construct
  source 1..22: mol_type = other RNA
ttgaagacctgcagtctgcagg

SEQ ID NO: 157079 - RNA, 22 nt, synthetic construct
  source 1..22: mol_type = other RNA
ttgaagagcgcttctatgtgac

SEQ ID NO: 157080 - RNA, 22 nt, synthetic construct
  source 1..22: mol_type = other RNA
ttgaagagggaacattttcatt

SEQ ID NO: 157081 - RNA, 22 nt, synthetic construct
  source 1..22: mol_type = other RNA
ttgaagatggcaaacagactga

SEQ ID NO: 157082 - RNA, 22 nt, synthetic construct
  source 1..22: mol_type = other RNA
ttgaagccagcacctaacaatg

SEQ ID NO: 157083 - RNA, 22 nt, synthetic construct
  source 1..22: mol_type = other RNA
ttgaagctactattccaggatc

SEQ ID NO: 157084 - RNA, 22 nt, synthetic construct
  source 1..22: mol_type = other RNA
ttgaagctctagtgagctatga

SEQ ID NO: 157085 - RNA, 22 nt, synthetic construct
  source 1..22: mol_type = other RNA
ttgaagcttcacttctctgctg

SEQ ID NO: 157086 - RNA, 22 nt, synthetic construct
  source 1..22: mol_type = other RNA
ttgaaggcaatgtagggaatag

SEQ ID NO: 157087 - RNA, 22 nt, synthetic construct
  source 1..22: mol_type = other RNA
ttgaaggcagaattatagaggg

SEQ ID NO: 157088 - RNA, 22 nt, synthetic construct
  source 1..22: mol_type = other RNA
ttgaagtacttcagcgcttgaa

SEQ ID NO: 157089 - RNA, 22 nt, synthetic construct
  source 1..22: mol_type = other RNA
ttgaagtatgtaattacagggg

SEQ ID NO: 157090 - RNA, 22 nt, synthetic construct
  source 1..22: mol_type = other RNA
ttgaagtcagttacagcatttc

SEQ ID NO: 157091 - RNA, 22 nt, synthetic construct
  source 1..22: mol_type = other RNA
ttgaagtctttggcccattttc

SEQ ID NO: 157092 - RNA, 22 nt, synthetic construct
  source 1..22: mol_type = other RNA
ttgaataaagggtcagaatttt

SEQ ID NO: 157093 - RNA, 22 nt, synthetic construct
  source 1..22: mol_type = other RNA
ttgaataacctcataagaactc

SEQ ID NO: 157094 - RNA, 22 nt, synthetic construct
  source 1..22: mol_type = other RNA
ttgaataaggtctgtaagtcag

SEQ ID NO: 157095 - RNA, 22 nt, synthetic construct
  source 1..22: mol_type = other RNA
ttgaataatttccaggtcatta

SEQ ID NO: 157096 - RNA, 22 nt, synthetic construct
  source 1..22: mol_type = other RNA
ttgaatactcgtgtgtctcata

SEQ ID NO: 157097 - RNA, 22 nt, synthetic construct
  source 1..22: mol_type = other RNA
ttgaatagcaactgttttttcc

SEQ ID NO: 157098 - RNA, 22 nt, synthetic construct
  source 1..22: mol_type = other RNA
ttgaatagcatcttagctcttc

SEQ ID NO: 157099 - RNA, 22 nt, synthetic construct
  source 1..22: mol_type = other RNA
ttgaatagggcctcaaatttca

SEQ ID NO: 157100 - RNA, 22 nt, synthetic construct
  source 1..22: mol_type = other RNA
ttgaatcatgggagccaaactt

SEQ ID NO: 157101 - RNA, 22 nt, synthetic construct
  source 1..22: mol_type = other RNA
ttgaatctctctatccaccact

SEQ ID NO: 157102 - RNA, 22 nt, synthetic construct
  source 1..22: mol_type = other RNA
ttgaatctgtagattgttttag

SEQ ID NO: 157103 - RNA, 22 nt, synthetic construct
  source 1..22: mol_type = other RNA
ttgaatcttaacatttctcatg

SEQ ID NO: 157104 - RNA, 22 nt, synthetic construct
  source 1..22: mol_type = other RNA
ttgaatgatgcgaaagaaaaaa

SEQ ID NO: 157105 - RNA, 22 nt, synthetic construct
  source 1..22: mol_type = other RNA
ttgaatggaaagaaatagaact

SEQ ID NO: 157106 - RNA, 22 nt, synthetic construct
  source 1..22: mol_type = other RNA
ttgaatggggatgcaacaaatg

SEQ ID NO: 157107 - RNA, 22 nt, synthetic construct
  source 1..22: mol_type = other RNA
ttgaatgtgcctacatagtcca

SEQ ID NO: 157108 - RNA, 22 nt, synthetic construct
  source 1..22: mol_type = other RNA
ttgaatgtggcagaatttacat

SEQ ID NO: 157109 - RNA, 22 nt, synthetic construct
  source 1..22: mol_type = other RNA
ttgaattaagcaccactagagt

SEQ ID NO: 157110 - RNA, 22 nt, synthetic construct
  source 1..22: mol_type = other RNA
ttgaattagtgattttaccaag

SEQ ID NO: 157111 - RNA, 22 nt, synthetic construct
  source 1..22: mol_type = other RNA
ttgaattcagatggccccaaaa

SEQ ID NO: 157112 - RNA, 22 nt, synthetic construct
  source 1..22: mol_type = other RNA
ttgaattctgcttattatatgc

SEQ ID NO: 157113 - RNA, 22 nt, synthetic construct
  source 1..22: mol_type = other RNA
ttgaattcttgacctcaaatga

SEQ ID NO: 157114 - RNA, 22 nt, synthetic construct
  source 1..22: mol_type = other RNA
ttgaattgttgcgcgtcaaaag

SEQ ID NO: 157115 - RNA, 22 nt, synthetic construct
  source 1..22: mol_type = other RNA
ttgaattgttggagttctttat

SEQ ID NO: 157116 - RNA, 22 nt, synthetic construct
  source 1..22: mol_type = other RNA
ttgaatttaagacacaaggaag

SEQ ID NO: 157117 - RNA, 22 nt, synthetic construct
  source 1..22: mol_type = other RNA
ttgaatttctgtccttggattg

SEQ ID NO: 157118 - RNA, 22 nt, synthetic construct
  source 1..22: mol_type = other RNA
ttgaatttggaaagggtagagc

SEQ ID NO: 157119 - RNA, 22 nt, synthetic construct
  source 1..22: mol_type = other RNA
ttgaattttccattcacacacc

SEQ ID NO: 157120 - RNA, 22 nt, synthetic construct
  source 1..22: mol_type = other RNA
ttgacaaaaggccccttgaaag

SEQ ID NO: 157121 - RNA, 22 nt, synthetic construct
  source 1..22: mol_type = other RNA
ttgacaagacgtgtacataaaa

SEQ ID NO: 157122 - RNA, 22 nt, synthetic construct
  source 1..22: mol_type = other RNA
ttgacaataaatggtgcaggcc

SEQ ID NO: 157123 - RNA, 22 nt, synthetic construct
  source 1..22: mol_type = other RNA
ttgacaatataggagactatcg

SEQ ID NO: 157124 - RNA, 22 nt, synthetic construct
  source 1..22: mol_type = other RNA
ttgacacaaaggactggaactc

SEQ ID NO: 157125 - RNA, 22 nt, synthetic construct
  source 1..22: mol_type = other RNA
ttgacagatgagactcttaata

SEQ ID NO: 157126 - RNA, 22 nt, synthetic construct
  source 1..22: mol_type = other RNA
ttgacagccacgtgtattgagt

SEQ ID NO: 157127 - RNA, 22 nt, synthetic construct
  source 1..22: mol_type = other RNA
ttgacatcctttaatttgggtt

SEQ ID NO: 157128 - RNA, 22 nt, synthetic construct
  source 1..22: mol_type = other RNA
ttgacatcctttgcgtctgtga

SEQ ID NO: 157129 - RNA, 22 nt, synthetic construct
  source 1..22: mol_type = other RNA
ttgacatcttgcataactcgta

SEQ ID NO: 157130 - RNA, 22 nt, synthetic construct
  source 1..22: mol_type = other RNA
ttgacatgacaggtgagtggac

SEQ ID NO: 157131 - RNA, 22 nt, synthetic construct
  source 1..22: mol_type = other RNA
ttgacatgattgaggacttcat

SEQ ID NO: 157132 - RNA, 22 nt, synthetic construct
  source 1..22: mol_type = other RNA
ttgacattcttaccttctaaaa

SEQ ID NO: 157133 - RNA, 22 nt, synthetic construct
  source 1..22: mol_type = other RNA
ttgacatttttcaaatacctag

SEQ ID NO: 157134 - RNA, 22 nt, synthetic construct
  source 1..22: mol_type = other RNA
ttgaccaaaacaaaaaacaaac

SEQ ID NO: 157135 - RNA, 22 nt, synthetic construct
  source 1..22: mol_type = other RNA
ttgaccaaacatgtgaggattt

SEQ ID NO: 157136 - RNA, 22 nt, synthetic construct
  source 1..22: mol_type = other RNA
ttgaccatgggacaagtgggtg

SEQ ID NO: 157137 - RNA, 22 nt, synthetic construct
  source 1..22: mol_type = other RNA
ttgaccattccacgctgtggct

SEQ ID NO: 157138 - RNA, 22 nt, synthetic construct
  source 1..22: mol_type = other RNA
ttgaccatttttatatctttgg

SEQ ID NO: 157139 - RNA, 22 nt, synthetic construct
  source 1..22: mol_type = other RNA
ttgacccaatcatgttctttat

SEQ ID NO: 157140 - RNA, 22 nt, synthetic construct
  source 1..22: mol_type = other RNA
ttgacccataaactgaacattt

SEQ ID NO: 157141 - RNA, 22 nt, synthetic construct
  source 1..22: mol_type = other RNA
ttgaccgctttcgtgagggttt

SEQ ID NO: 157142 - RNA, 22 nt, synthetic construct
  source 1..22: mol_type = other RNA
ttgacctcagtggtagttacac

SEQ ID NO: 157143 - RNA, 22 nt, synthetic construct
  source 1..22: mol_type = other RNA
ttgacctcccaaaggactggga

SEQ ID NO: 157144 - RNA, 22 nt, synthetic construct
  source 1..22: mol_type = other RNA
ttgacctgtaatttttctcttt

SEQ ID NO: 157145 - RNA, 22 nt, synthetic construct
  source 1..22: mol_type = other RNA
ttgaccttagtggttgacccat

SEQ ID NO: 157146 - RNA, 22 nt, synthetic construct
  source 1..22: mol_type = other RNA
ttgaccttagttttcacttttg

SEQ ID NO: 157147 - RNA, 22 nt, synthetic construct
  source 1..22: mol_type = other RNA
ttgaccttccttgtgtcttaaa

SEQ ID NO: 157148 - RNA, 22 nt, synthetic construct
  source 1..22: mol_type = other RNA
ttgaccttctacttatcttttc

SEQ ID NO: 157149 - RNA, 22 nt, synthetic construct
  source 1..22: mol_type = other RNA
ttgaccttgtatccagtaatct

SEQ ID NO: 157150 - RNA, 22 nt, synthetic construct
  source 1..22: mol_type = other RNA
ttgaccttgtgcatgtgcagga

SEQ ID NO: 157151 - RNA, 22 nt, synthetic construct
  source 1..22: mol_type = other RNA
ttgacgaagtcacattctagtg

SEQ ID NO: 157152 - RNA, 22 nt, synthetic construct
  source 1..22: mol_type = other RNA
ttgacgcgcaacaattcaacag

SEQ ID NO: 157153 - RNA, 22 nt, synthetic construct
  source 1..22: mol_type = other RNA
ttgactaccaattctccctgaa

SEQ ID NO: 157154 - RNA, 22 nt, synthetic construct
  source 1..22: mol_type = other RNA
ttgactaccatctctccaacag

SEQ ID NO: 157155 - RNA, 22 nt, synthetic construct
  source 1..22: mol_type = other RNA
ttgactattttaccctcatttt

SEQ ID NO: 157156 - RNA, 22 nt, synthetic construct
  source 1..22: mol_type = other RNA
ttgactcagtacttccctcttt

SEQ ID NO: 157157 - RNA, 22 nt, synthetic construct
  source 1..22: mol_type = other RNA
ttgactcctaaaacatggtcca

SEQ ID NO: 157158 - RNA, 22 nt, synthetic construct
  source 1..22: mol_type = other RNA
ttgactgaattaatctcttaca

SEQ ID NO: 157159 - RNA, 22 nt, synthetic construct
  source 1..22: mol_type = other RNA
ttgactgacataactgtaaagt

SEQ ID NO: 157160 - RNA, 22 nt, synthetic construct
  source 1..22: mol_type = other RNA
ttgacttcactagatctctttt

SEQ ID NO: 157161 - RNA, 22 nt, synthetic construct
  source 1..22: mol_type = other RNA
ttgacttcacttccaagtcccg

SEQ ID NO: 157162 - RNA, 22 nt, synthetic construct
  source 1..22: mol_type = other RNA
ttgacttctcagggcctgcttt

SEQ ID NO: 157163 - RNA, 22 nt, synthetic construct
  source 1..22: mol_type = other RNA
ttgactttaccctgctggaacg

SEQ ID NO: 157164 - RNA, 22 nt, synthetic construct
  source 1..22: mol_type = other RNA
ttgagaaactatccaacatgcc

SEQ ID NO: 157165 - RNA, 22 nt, synthetic construct
  source 1..22: mol_type = other RNA
ttgagaaagagggaagtactga

SEQ ID NO: 157166 - RNA, 22 nt, synthetic construct
  source 1..22: mol_type = other RNA
ttgagaaagcacataaaaaagg

SEQ ID NO: 157167 - RNA, 22 nt, synthetic construct
  source 1..22: mol_type = other RNA
ttgagaaaggtttcttcactct

SEQ ID NO: 157168 - RNA, 22 nt, synthetic construct
  source 1..22: mol_type = other RNA
ttgagaagcagaaaatcagtgt

SEQ ID NO: 157169 - RNA, 22 nt, synthetic construct
  source 1..22: mol_type = other RNA
ttgagaagccacacagtacaag

SEQ ID NO: 157170 - RNA, 22 nt, synthetic construct
  source 1..22: mol_type = other RNA
ttgagaagtcttttcctaccct

SEQ ID NO: 157171 - RNA, 22 nt, synthetic construct
  source 1..22: mol_type = other RNA
ttgagaatttcaggtgtgtaaa

SEQ ID NO: 157172 - RNA, 22 nt, synthetic construct
  source 1..22: mol_type = other RNA
ttgagacaagaccacaccactg

SEQ ID NO: 157173 - RNA, 22 nt, synthetic construct
  source 1..22: mol_type = other RNA
ttgagacacggtctcacactgt

SEQ ID NO: 157174 - RNA, 22 nt, synthetic construct
  source 1..22: mol_type = other RNA
ttgagacagattctctgtctct

SEQ ID NO: 157175 - RNA, 22 nt, synthetic construct
  source 1..22: mol_type = other RNA
ttgagacagggtctcactctta

SEQ ID NO: 157176 - RNA, 22 nt, synthetic construct
  source 1..22: mol_type = other RNA
ttgagaccagcgtgggcaacac

SEQ ID NO: 157177 - RNA, 22 nt, synthetic construct
  source 1..22: mol_type = other RNA
ttgagacctcaggcagtctagt

SEQ ID NO: 157178 - RNA, 22 nt, synthetic construct
  source 1..22: mol_type = other RNA
ttgagacggaagactcatactt

SEQ ID NO: 157179 - RNA, 22 nt, synthetic construct
  source 1..22: mol_type = other RNA
ttgagacggaatcttaccctgt

SEQ ID NO: 157180 - RNA, 22 nt, synthetic construct
  source 1..22: mol_type = other RNA
ttgagactgcagtgacctatca

SEQ ID NO: 157181 - RNA, 22 nt, synthetic construct
  source 1..22: mol_type = other RNA
ttgagagagaattctaaattgc

SEQ ID NO: 157182 - RNA, 22 nt, synthetic construct
  source 1..22: mol_type = other RNA
ttgagagagataaaacctggaa

SEQ ID NO: 157183 - RNA, 22 nt, synthetic construct
  source 1..22: mol_type = other RNA
ttgagagcagagacacacatca

SEQ ID NO: 157184 - RNA, 22 nt, synthetic construct
  source 1..22: mol_type = other RNA
ttgagagctttcttttaaagac

SEQ ID NO: 157185 - RNA, 22 nt, synthetic construct
  source 1..22: mol_type = other RNA
ttgagaggctttaagcagaaag

SEQ ID NO: 157186 - RNA, 22 nt, synthetic construct
  source 1..22: mol_type = other RNA
ttgagagtaagttgcatacgtc

SEQ ID NO: 157187 - RNA, 22 nt, synthetic construct
  source 1..22: mol_type = other RNA
ttgagagtctcttaagaccaca

SEQ ID NO: 157188 - RNA, 22 nt, synthetic construct
  source 1..22: mol_type = other RNA
ttgagagtgaaaacacaaactg

SEQ ID NO: 157189 - RNA, 22 nt, synthetic construct
  source 1..22: mol_type = other RNA
ttgagagtgcagtatgtaggaa

SEQ ID NO: 157190 - RNA, 22 nt, synthetic construct
  source 1..22: mol_type = other RNA
ttgagatgtactggaagtgtaa

SEQ ID NO: 157191 - RNA, 22 nt, synthetic construct
  source 1..22: mol_type = other RNA
ttgagattagcgaaagggattc

SEQ ID NO: 157192 - RNA, 22 nt, synthetic construct
  source 1..22: mol_type = other RNA
ttgagatttgagtcttgctctc

SEQ ID NO: 157193 - RNA, 22 nt, synthetic construct
  source 1..22: mol_type = other RNA
ttgagcagagtcctgagggtga

SEQ ID NO: 157194 - RNA, 22 nt, synthetic construct
  source 1..22: mol_type = other RNA
ttgagcagatcagtaacaaata

SEQ ID NO: 157195 - RNA, 22 nt, synthetic construct
  source 1..22: mol_type = other RNA
ttgagccaaagaagaaatcaaa

SEQ ID NO: 157196 - RNA, 22 nt, synthetic construct
  source 1..22: mol_type = other RNA
ttgagccatcatgcctgggtaa

SEQ ID NO: 157197 - RNA, 22 nt, synthetic construct
  source 1..22: mol_type = other RNA
ttgagcccaggaggttgaagct

SEQ ID NO: 157198 - RNA, 22 nt, synthetic construct
  source 1..22: mol_type = other RNA
ttgagcccagggggtcgagact

SEQ ID NO: 157199 - RNA, 22 nt, synthetic construct
  source 1..22: mol_type = other RNA
ttgagccccagaataggcaaat

SEQ ID NO: 157200 - RNA, 22 nt, synthetic construct
  source 1..22: mol_type = other RNA
ttgagcctggaagttcaaggtt

SEQ ID NO: 157201 - RNA, 22 nt, synthetic construct
  source 1..22: mol_type = other RNA
ttgagcctgttccgattttact

SEQ ID NO: 157202 - RNA, 22 nt, synthetic construct
  source 1..22: mol_type = other RNA
ttgagctacaaactccaaacct

SEQ ID NO: 157203 - RNA, 22 nt, synthetic construct
  source 1..22: mol_type = other RNA
ttgagctgaaagtaaagatagc

SEQ ID NO: 157204 - RNA, 22 nt, synthetic construct
  source 1..22: mol_type = other RNA
ttgagctgtccccaccgccttc

SEQ ID NO: 157205 - RNA, 22 nt, synthetic construct
  source 1..22: mol_type = other RNA
ttgaggacttcatgtacaatga

SEQ ID NO: 157206 - RNA, 22 nt, synthetic construct
  source 1..22: mol_type = other RNA
ttgaggatgactgtcctgaatt

SEQ ID NO: 157207 - RNA, 22 nt, synthetic construct
  source 1..22: mol_type = other RNA
ttgaggcagagagatggtggga

SEQ ID NO: 157208 - RNA, 22 nt, synthetic construct
  source 1..22: mol_type = other RNA
ttgaggcattagtgaattcaca

SEQ ID NO: 157209 - RNA, 22 nt, synthetic construct
  source 1..22: mol_type = other RNA
ttgaggccctattcaacctata

SEQ ID NO: 157210 - RNA, 22 nt, synthetic construct
  source 1..22: mol_type = other RNA
ttgaggccgcagtgagccatgg

SEQ ID NO: 157211 - RNA, 22 nt, synthetic construct
  source 1..22: mol_type = other RNA
ttgaggctgggagtacaagacc

SEQ ID NO: 157212 - RNA, 22 nt, synthetic construct
  source 1..22: mol_type = other RNA
ttgaggctgggccctgtggctc

SEQ ID NO: 157213 - RNA, 22 nt, synthetic construct
  source 1..22: mol_type = other RNA
ttgaggcttttcatagtcatca

SEQ ID NO: 157214 - RNA, 22 nt, synthetic construct
  source 1..22: mol_type = other RNA
ttgaggcttttggattttcttt

SEQ ID NO: 157215 - RNA, 22 nt, synthetic construct
  source 1..22: mol_type = other RNA
ttgagggtgctgatcaggaaag

SEQ ID NO: 157216 - RNA, 22 nt, synthetic construct
  source 1..22: mol_type = other RNA
ttgagggttagaagacaatact

SEQ ID NO: 157217 - RNA, 22 nt, synthetic construct
  source 1..22: mol_type = other RNA
ttgagggttagatttttccttt

SEQ ID NO: 157218 - RNA, 22 nt, synthetic construct
  source 1..22: mol_type = other RNA
ttgaggtaagaacttgtctttg

SEQ ID NO: 157219 - RNA, 22 nt, synthetic construct
  source 1..22: mol_type = other RNA
ttgaggtagcacaactagtaag

SEQ ID NO: 157220 - RNA, 22 nt, synthetic construct
  source 1..22: mol_type = other RNA
ttgaggtctaggctaatgtgtg

SEQ ID NO: 157221 - RNA, 22 nt, synthetic construct
  source 1..22: mol_type = other RNA
ttgaggtcttctagctttcagc

SEQ ID NO: 157222 - RNA, 22 nt, synthetic construct
  source 1..22: mol_type = other RNA
ttgaggtgagacagaccctggc

SEQ ID NO: 157223 - RNA, 22 nt, synthetic construct
  source 1..22: mol_type = other RNA
ttgaggtgattaaaggccctga

SEQ ID NO: 157224 - RNA, 22 nt, synthetic construct
  source 1..22: mol_type = other RNA
ttgaggtgattcagagtgctgg

SEQ ID NO: 157225 - RNA, 22 nt, synthetic construct
  source 1..22: mol_type = other RNA
ttgaggtgtacaattaggctgt

SEQ ID NO: 157226 - RNA, 22 nt, synthetic construct
  source 1..22: mol_type = other RNA
ttgaggttattaagataatgct

SEQ ID NO: 157227 - RNA, 22 nt, synthetic construct
  source 1..22: mol_type = other RNA
ttgaggttgaagacctgcagtc

SEQ ID NO: 157228 - RNA, 22 nt, synthetic construct
  source 1..22: mol_type = other RNA
ttgaggtttacttggggagagt

SEQ ID NO: 157229 - RNA, 22 nt, synthetic construct
  source 1..22: mol_type = other RNA
ttgagtacctctgggatgctca

SEQ ID NO: 157230 - RNA, 22 nt, synthetic construct
  source 1..22: mol_type = other RNA
ttgagtagcaccctatttatgt

SEQ ID NO: 157231 - RNA, 22 nt, synthetic construct
  source 1..22: mol_type = other RNA
ttgagtagttcatgttagcata

SEQ ID NO: 157232 - RNA, 22 nt, synthetic construct
  source 1..22: mol_type = other RNA
ttgagtatctggtgctggcagc

SEQ ID NO: 157233 - RNA, 22 nt, synthetic construct
  source 1..22: mol_type = other RNA
ttgagtatcttttcatgttgac

SEQ ID NO: 157234 - RNA, 22 nt, synthetic construct
  source 1..22: mol_type = other RNA
ttgagtatttcatgtacttgta

SEQ ID NO: 157235 - RNA, 22 nt, synthetic construct
  source 1..22: mol_type = other RNA
ttgagtatttttgagcttttca

SEQ ID NO: 157236 - RNA, 22 nt, synthetic construct
  source 1..22: mol_type = other RNA
ttgagtcagtaatcaaaaacct

SEQ ID NO: 157237 - RNA, 22 nt, synthetic construct
  source 1..22: mol_type = other RNA
ttgagtctgtagggtgactagt

SEQ ID NO: 157238 - RNA, 22 nt, synthetic construct
  source 1..22: mol_type = other RNA
ttgagtctgtgctctgtattta

SEQ ID NO: 157239 - RNA, 22 nt, synthetic construct
  source 1..22: mol_type = other RNA
ttgagtcttgctctcttgccta

SEQ ID NO: 157240 - RNA, 22 nt, synthetic construct
  source 1..22: mol_type = other RNA
ttgagtcttgtttacccagtgt

SEQ ID NO: 157241 - RNA, 22 nt, synthetic construct
  source 1..22: mol_type = other RNA
ttgagtgcaggagtttgagact

SEQ ID NO: 157242 - RNA, 22 nt, synthetic construct
  source 1..22: mol_type = other RNA
ttgagtggcatcatactggaag

SEQ ID NO: 157243 - RNA, 22 nt, synthetic construct
  source 1..22: mol_type = other RNA
ttgagtgtaaggtgtttggtga

SEQ ID NO: 157244 - RNA, 22 nt, synthetic construct
  source 1..22: mol_type = other RNA
ttgagtgtagctgtggctcact

SEQ ID NO: 157245 - RNA, 22 nt, synthetic construct
  source 1..22: mol_type = other RNA
ttgagttaggaatttacatttc

SEQ ID NO: 157246 - RNA, 22 nt, synthetic construct
  source 1..22: mol_type = other RNA
ttgagttattgcatagggatgt

SEQ ID NO: 157247 - RNA, 22 nt, synthetic construct
  source 1..22: mol_type = other RNA
ttgagttcagaaagattaatcc

SEQ ID NO: 157248 - RNA, 22 nt, synthetic construct
  source 1..22: mol_type = other RNA
ttgagttcagttttgtatatgg

SEQ ID NO: 157249 - RNA, 22 nt, synthetic construct
  source 1..22: mol_type = other RNA
ttgagttcatgtcctttgtagg

SEQ ID NO: 157250 - RNA, 22 nt, synthetic construct
  source 1..22: mol_type = other RNA
ttgagttgtttccactttgagg

SEQ ID NO: 157251 - RNA, 22 nt, synthetic construct
  source 1..22: mol_type = other RNA
ttgagtttcaatgacttttatc

SEQ ID NO: 157252 - RNA, 22 nt, synthetic construct
  source 1..22: mol_type = other RNA
ttgagtttccagaaaactggca

SEQ ID NO: 157253 - RNA, 22 nt, synthetic construct
  source 1..22: mol_type = other RNA
ttgagtttggtgtatttagtat

SEQ ID NO: 157254 - RNA, 22 nt, synthetic construct
  source 1..22: mol_type = other RNA
ttgagtttgttctgtcacattt

SEQ ID NO: 157255 - RNA, 22 nt, synthetic construct
  source 1..22: mol_type = other RNA
ttgagttttcaacctttgttga

SEQ ID NO: 157256 - RNA, 22 nt, synthetic construct
  source 1..22: mol_type = other RNA
ttgataaaaatctctacaggga

SEQ ID NO: 157257 - RNA, 22 nt, synthetic construct
  source 1..22: mol_type = other RNA
ttgataaaactgaagtttatcg

SEQ ID NO: 157258 - RNA, 22 nt, synthetic construct
  source 1..22: mol_type = other RNA
ttgataaaagtcattgaaactc

SEQ ID NO: 157259 - RNA, 22 nt, synthetic construct
  source 1..22: mol_type = other RNA
ttgataaatctaaagccaatct

SEQ ID NO: 157260 - RNA, 22 nt, synthetic construct
  source 1..22: mol_type = other RNA
ttgataagcacatggtgataac

SEQ ID NO: 157261 - RNA, 22 nt, synthetic construct
  source 1..22: mol_type = other RNA
ttgatacaatacttggatctta

SEQ ID NO: 157262 - RNA, 22 nt, synthetic construct
  source 1..22: mol_type = other RNA
ttgatacggagtctcgctctgt

SEQ ID NO: 157263 - RNA, 22 nt, synthetic construct
  source 1..22: mol_type = other RNA
ttgatactagtttagtgcagta

SEQ ID NO: 157264 - RNA, 22 nt, synthetic construct
  source 1..22: mol_type = other RNA
ttgatagttgcagattcatctt

SEQ ID NO: 157265 - RNA, 22 nt, synthetic construct
  source 1..22: mol_type = other RNA
ttgatatctgagtgttgtgtgc

SEQ ID NO: 157266 - RNA, 22 nt, synthetic construct
  source 1..22: mol_type = other RNA
ttgatatttttcagattgacct

SEQ ID NO: 157267 - RNA, 22 nt, synthetic construct
  source 1..22: mol_type = other RNA
ttgatcagcttcctacccaagc

SEQ ID NO: 157268 - RNA, 22 nt, synthetic construct
  source 1..22: mol_type = other RNA
ttgatcagggatttggccagaa

SEQ ID NO: 157269 - RNA, 22 nt, synthetic construct
  source 1..22: mol_type = other RNA
ttgatcatacacatccagaagt

SEQ ID NO: 157270 - RNA, 22 nt, synthetic construct
  source 1..22: mol_type = other RNA
ttgatcatcgcattacgagtta

SEQ ID NO: 157271 - RNA, 22 nt, synthetic construct
  source 1..22: mol_type = other RNA
ttgatccaggtgtatgatctta

SEQ ID NO: 157272 - RNA, 22 nt, synthetic construct
  source 1..22: mol_type = other RNA
ttgatccattacatcaacatat

SEQ ID NO: 157273 - RNA, 22 nt, synthetic construct
  source 1..22: mol_type = other RNA
ttgatccattttgagttcagtt

SEQ ID NO: 157274 - RNA, 22 nt, synthetic construct
  source 1..22: mol_type = other RNA
ttgatcccactagtggaagaat

SEQ ID NO: 157275 - RNA, 22 nt, synthetic construct
  source 1..22: mol_type = other RNA
ttgatcctggaatagtagcttc

SEQ ID NO: 157276 - RNA, 22 nt, synthetic construct
  source 1..22: mol_type = other RNA
ttgatctaaaatggaagacttt

SEQ ID NO: 157277 - RNA, 22 nt, synthetic construct
  source 1..22: mol_type = other RNA
ttgatctgccaggacaattgaa

SEQ ID NO: 157278 - RNA, 22 nt, synthetic construct
  source 1..22: mol_type = other RNA
ttgatctggtcacaaacacaaa

SEQ ID NO: 157279 - RNA, 22 nt, synthetic construct
  source 1..22: mol_type = other RNA
ttgatctttacttcccttctcg

SEQ ID NO: 157280 - RNA, 22 nt, synthetic construct
  source 1..22: mol_type = other RNA
ttgatgaattccagtttatcta

SEQ ID NO: 157281 - RNA, 22 nt, synthetic construct
  source 1..22: mol_type = other RNA
ttgatgacttacagatatcacc

SEQ ID NO: 157282 - RNA, 22 nt, synthetic construct
  source 1..22: mol_type = other RNA
ttgatgatagaataccacttag

SEQ ID NO: 157283 - RNA, 22 nt, synthetic construct
  source 1..22: mol_type = other RNA
ttgatgcaatttgttttccaag

SEQ ID NO: 157284 - RNA, 22 nt, synthetic construct
  source 1..22: mol_type = other RNA
ttgatgcacaaaagtttaactt

SEQ ID NO: 157285 - RNA, 22 nt, synthetic construct
  source 1..22: mol_type = other RNA
ttgatggacgtttgagttgttt

SEQ ID NO: 157286 - RNA, 22 nt, synthetic construct
  source 1..22: mol_type = other RNA
ttgatggctgtactaagcctat

SEQ ID NO: 157287 - RNA, 22 nt, synthetic construct
  source 1..22: mol_type = other RNA
ttgatggtttggggcttttgaa

SEQ ID NO: 157288 - RNA, 22 nt, synthetic construct
  source 1..22: mol_type = other RNA
ttgatgtaatggatcaaggcac

SEQ ID NO: 157289 - RNA, 22 nt, synthetic construct
  source 1..22: mol_type = other RNA
ttgatgtcacaagccagggtct

SEQ ID NO: 157290 - RNA, 22 nt, synthetic construct
  source 1..22: mol_type = other RNA
ttgattacaagggtgacagagc

SEQ ID NO: 157291 - RNA, 22 nt, synthetic construct
  source 1..22: mol_type = other RNA
ttgattactgactcaatcttct

SEQ ID NO: 157292 - RNA, 22 nt, synthetic construct
  source 1..22: mol_type = other RNA
ttgattactttacagttatgtc

SEQ ID NO: 157293 - RNA, 22 nt, synthetic construct
  source 1..22: mol_type = other RNA
ttgattagcttcctcaggatct

SEQ ID NO: 157294 - RNA, 22 nt, synthetic construct
  source 1..22: mol_type = other RNA
ttgattagttgactcctaaaac

SEQ ID NO: 157295 - RNA, 22 nt, synthetic construct
  source 1..22: mol_type = other RNA
ttgattatgttagatatcccat

SEQ ID NO: 157296 - RNA, 22 nt, synthetic construct
  source 1..22: mol_type = other RNA
ttgattatttttacccaacatg

SEQ ID NO: 157297 - RNA, 22 nt, synthetic construct
  source 1..22: mol_type = other RNA
ttgattcagatgacagaaataa

SEQ ID NO: 157298 - RNA, 22 nt, synthetic construct
  source 1..22: mol_type = other RNA
ttgattccagtttctctgcttt

SEQ ID NO: 157299 - RNA, 22 nt, synthetic construct
  source 1..22: mol_type = other RNA
ttgattgccagttttctggaaa

SEQ ID NO: 157300 - RNA, 22 nt, synthetic construct
  source 1..22: mol_type = other RNA
ttgattggcaaatctttagtgt

SEQ ID NO: 157301 - RNA, 22 nt, synthetic construct
  source 1..22: mol_type = other RNA
ttgattgggcattaattgagag

SEQ ID NO: 157302 - RNA, 22 nt, synthetic construct
  source 1..22: mol_type = other RNA
ttgattgttagccacagcgttg

SEQ ID NO: 157303 - RNA, 22 nt, synthetic construct
  source 1..22: mol_type = other RNA
ttgattgttccaggggggaaaa

SEQ ID NO: 157304 - RNA, 22 nt, synthetic construct
  source 1..22: mol_type = other RNA
ttgattgttgccatcattttat

SEQ ID NO: 157305 - RNA, 22 nt, synthetic construct
  source 1..22: mol_type = other RNA
ttgatttagaaatacctgcagg

SEQ ID NO: 157306 - RNA, 22 nt, synthetic construct
  source 1..22: mol_type = other RNA
ttgatttatggcctaagatgga

SEQ ID NO: 157307 - RNA, 22 nt, synthetic construct
  source 1..22: mol_type = other RNA
ttgatttcttctttggctcaat

SEQ ID NO: 157308 - RNA, 22 nt, synthetic construct
  source 1..22: mol_type = other RNA
ttgatttgaccatgggacaagt

SEQ ID NO: 157309 - RNA, 22 nt, synthetic construct
  source 1..22: mol_type = other RNA
ttgatttgcatttctctaatag

SEQ ID NO: 157310 - RNA, 22 nt, synthetic construct
  source 1..22: mol_type = other RNA
ttgatttgttatatccagattg

SEQ ID NO: 157311 - RNA, 22 nt, synthetic construct
  source 1..22: mol_type = other RNA
ttgattttgaggcagagagatg

SEQ ID NO: 157312 - RNA, 22 nt, synthetic construct
  source 1..22: mol_type = other RNA
ttgattttgtatcctgagactt

SEQ ID NO: 157313 - RNA, 22 nt, synthetic construct
  source 1..22: mol_type = other RNA
ttgattttgtttatttgctgtc

SEQ ID NO: 157314 - RNA, 22 nt, synthetic construct
  source 1..22: mol_type = other RNA
ttgcaaaaacagtttccctctg

SEQ ID NO: 157315 - RNA, 22 nt, synthetic construct
  source 1..22: mol_type = other RNA
ttgcaaaaatactacaagagtt

SEQ ID NO: 157316 - RNA, 22 nt, synthetic construct
  source 1..22: mol_type = other RNA
ttgcaaaaattttgttcaggag

SEQ ID NO: 157317 - RNA, 22 nt, synthetic construct
  source 1..22: mol_type = other RNA
ttgcaaaacaatagcccagcag

SEQ ID NO: 157318 - RNA, 22 nt, synthetic construct
  source 1..22: mol_type = other RNA
ttgcaaaacggaaactttatac

SEQ ID NO: 157319 - RNA, 22 nt, synthetic construct
  source 1..22: mol_type = other RNA
ttgcaaaccaaatgcagaaaat

SEQ ID NO: 157320 - RNA, 22 nt, synthetic construct
  source 1..22: mol_type = other RNA
ttgcaaactaagtggtattcta

SEQ ID NO: 157321 - RNA, 22 nt, synthetic construct
  source 1..22: mol_type = other RNA
ttgcaaattattttcctccttc

SEQ ID NO: 157322 - RNA, 22 nt, synthetic construct
  source 1..22: mol_type = other RNA
ttgcaacagaataaatgaaaac

SEQ ID NO: 157323 - RNA, 22 nt, synthetic construct
  source 1..22: mol_type = other RNA
ttgcaagatgcataagttctag

SEQ ID NO: 157324 - RNA, 22 nt, synthetic construct
  source 1..22: mol_type = other RNA
ttgcaagattaatcttgtgaat

SEQ ID NO: 157325 - RNA, 22 nt, synthetic construct
  source 1..22: mol_type = other RNA
ttgcaagccacattagccactc

SEQ ID NO: 157326 - RNA, 22 nt, synthetic construct
  source 1..22: mol_type = other RNA
ttgcaaggcccaccatgatgca

SEQ ID NO: 157327 - RNA, 22 nt, synthetic construct
  source 1..22: mol_type = other RNA
ttgcaatacagttaacgtatga

SEQ ID NO: 157328 - RNA, 22 nt, synthetic construct
  source 1..22: mol_type = other RNA
ttgcaatttatatgatactcgt

SEQ ID NO: 157329 - RNA, 22 nt, synthetic construct
  source 1..22: mol_type = other RNA
ttgcacaaaagtgaaaactaag

SEQ ID NO: 157330 - RNA, 22 nt, synthetic construct
  source 1..22: mol_type = other RNA
ttgcacaatgttgtggatgtcc

SEQ ID NO: 157331 - RNA, 22 nt, synthetic construct
  source 1..22: mol_type = other RNA
ttgcacacaccaaatcatgaaa

SEQ ID NO: 157332 - RNA, 22 nt, synthetic construct
  source 1..22: mol_type = other RNA
ttgcacagtctcccccaggtgg

SEQ ID NO: 157333 - RNA, 22 nt, synthetic construct
  source 1..22: mol_type = other RNA
ttgcacattagaatcatccggg

SEQ ID NO: 157334 - RNA, 22 nt, synthetic construct
  source 1..22: mol_type = other RNA
ttgcaccaactccacattgtct

SEQ ID NO: 157335 - RNA, 22 nt, synthetic construct
  source 1..22: mol_type = other RNA
ttgcacggtgaagaaccgactg

SEQ ID NO: 157336 - RNA, 22 nt, synthetic construct
  source 1..22: mol_type = other RNA
ttgcacgtttttagaaatttac

SEQ ID NO: 157337 - RNA, 22 nt, synthetic construct
  source 1..22: mol_type = other RNA
ttgcactccacgtgggtgacag

SEQ ID NO: 157338 - RNA, 22 nt, synthetic construct
  source 1..22: mol_type = other RNA
ttgcactccagcctaggcaaga

SEQ ID NO: 157339 - RNA, 22 nt, synthetic construct
  source 1..22: mol_type = other RNA
ttgcactggcacagcactgtta

SEQ ID NO: 157340 - RNA, 22 nt, synthetic construct
  source 1..22: mol_type = other RNA
ttgcagaagagtgaagctggac

SEQ ID NO: 157341 - RNA, 22 nt, synthetic construct
  source 1..22: mol_type = other RNA
ttgcagacaataattcttcctg

SEQ ID NO: 157342 - RNA, 22 nt, synthetic construct
  source 1..22: mol_type = other RNA
ttgcagagacggggtcccacta

SEQ ID NO: 157343 - RNA, 22 nt, synthetic construct
  source 1..22: mol_type = other RNA
ttgcagagactggatagcaact

SEQ ID NO: 157344 - RNA, 22 nt, synthetic construct
  source 1..22: mol_type = other RNA
ttgcagagcaaactcagatctg

SEQ ID NO: 157345 - RNA, 22 nt, synthetic construct
  source 1..22: mol_type = other RNA
ttgcagagtgttcaaaagcccc

SEQ ID NO: 157346 - RNA, 22 nt, synthetic construct
  source 1..22: mol_type = other RNA
ttgcagattcatcttgacttca

SEQ ID NO: 157347 - RNA, 22 nt, synthetic construct
  source 1..22: mol_type = other RNA
ttgcagcatgctcactgtctcc

SEQ ID NO: 157348 - RNA, 22 nt, synthetic construct
  source 1..22: mol_type = other RNA
ttgcagccagagagtggaaaga

SEQ ID NO: 157349 - RNA, 22 nt, synthetic construct
  source 1..22: mol_type = other RNA
ttgcagccttccctgaacaatg

SEQ ID NO: 157350 - RNA, 22 nt, synthetic construct
  source 1..22: mol_type = other RNA
ttgcaggtgtgggccaccaagc

SEQ ID NO: 157351 - RNA, 22 nt, synthetic construct
  source 1..22: mol_type = other RNA
ttgcaggtttactccaagaagg

SEQ ID NO: 157352 - RNA, 22 nt, synthetic construct
  source 1..22: mol_type = other RNA
ttgcagtagtattgaactgtta

SEQ ID NO: 157353 - RNA, 22 nt, synthetic construct
  source 1..22: mol_type = other RNA
ttgcagtccccggtctttcctg

SEQ ID NO: 157354 - RNA, 22 nt, synthetic construct
  source 1..22: mol_type = other RNA
ttgcagtgagcccagagatccc

SEQ ID NO: 157355 - RNA, 22 nt, synthetic construct
  source 1..22: mol_type = other RNA
ttgcagttggggactcttatgg

SEQ ID NO: 157356 - RNA, 22 nt, synthetic construct
  source 1..22: mol_type = other RNA
ttgcataactcgtaatgcgatg

SEQ ID NO: 157357 - RNA, 22 nt, synthetic construct
  source 1..22: mol_type = other RNA
ttgcatacgtcgtcccccatcc

SEQ ID NO: 157358 - RNA, 22 nt, synthetic construct
  source 1..22: mol_type = other RNA
ttgcatagggatgttgcctact

SEQ ID NO: 157359 - RNA, 22 nt, synthetic construct
  source 1..22: mol_type = other RNA
ttgcatcaactgcttccctagc

SEQ ID NO: 157360 - RNA, 22 nt, synthetic construct
  source 1..22: mol_type = other RNA
ttgcatcacttgaggtgattaa

SEQ ID NO: 157361 - RNA, 22 nt, synthetic construct
  source 1..22: mol_type = other RNA
ttgcatccccattcaattgtcc

SEQ ID NO: 157362 - RNA, 22 nt, synthetic construct
  source 1..22: mol_type = other RNA
ttgcatgagacttggagtttga

SEQ ID NO: 157363 - RNA, 22 nt, synthetic construct
  source 1..22: mol_type = other RNA
ttgcattacatgaatggaaaat

SEQ ID NO: 157364 - RNA, 22 nt, synthetic construct
  source 1..22: mol_type = other RNA
ttgcattagagccccaagaaag

SEQ ID NO: 157365 - RNA, 22 nt, synthetic construct
  source 1..22: mol_type = other RNA
ttgcattcctgaaatgaaccaa

SEQ ID NO: 157366 - RNA, 22 nt, synthetic construct
  source 1..22: mol_type = other RNA
ttgcattgactaccaattctcc

SEQ ID NO: 157367 - RNA, 22 nt, synthetic construct
  source 1..22: mol_type = other RNA
ttgcatttacttgtcatttctg

SEQ ID NO: 157368 - RNA, 22 nt, synthetic construct
  source 1..22: mol_type = other RNA
ttgcatttctctaatagctagt

SEQ ID NO: 157369 - RNA, 22 nt, synthetic construct
  source 1..22: mol_type = other RNA
ttgccaaaatgattttcacagg

SEQ ID NO: 157370 - RNA, 22 nt, synthetic construct
  source 1..22: mol_type = other RNA
ttgccaaactgttttccacagt

SEQ ID NO: 157371 - RNA, 22 nt, synthetic construct
  source 1..22: mol_type = other RNA
ttgccaaagattcttgtcatga

SEQ ID NO: 157372 - RNA, 22 nt, synthetic construct
  source 1..22: mol_type = other RNA
ttgccaaattatttgagagtaa

SEQ ID NO: 157373 - RNA, 22 nt, synthetic construct
  source 1..22: mol_type = other RNA
ttgccaacagttactttccttt

SEQ ID NO: 157374 - RNA, 22 nt, synthetic construct
  source 1..22: mol_type = other RNA
ttgccaaggcttgctttggcta

SEQ ID NO: 157375 - RNA, 22 nt, synthetic construct
  source 1..22: mol_type = other RNA
ttgccaagtataagatgatgat

SEQ ID NO: 157376 - RNA, 22 nt, synthetic construct
  source 1..22: mol_type = other RNA
ttgccaatatctatcagggctg

SEQ ID NO: 157377 - RNA, 22 nt, synthetic construct
  source 1..22: mol_type = other RNA
ttgccaatcaataattctgtgc

SEQ ID NO: 157378 - RNA, 22 nt, synthetic construct
  source 1..22: mol_type = other RNA
ttgccacattttaccaaaacag

SEQ ID NO: 157379 - RNA, 22 nt, synthetic construct
  source 1..22: mol_type = other RNA
ttgccagctaacttttaaccca

SEQ ID NO: 157380 - RNA, 22 nt, synthetic construct
  source 1..22: mol_type = other RNA
ttgccaggtggacgcggccccg

SEQ ID NO: 157381 - RNA, 22 nt, synthetic construct
  source 1..22: mol_type = other RNA
ttgccaggtttgtgcttggata

SEQ ID NO: 157382 - RNA, 22 nt, synthetic construct
  source 1..22: mol_type = other RNA
ttgccagtgttttaaagcaggg

SEQ ID NO: 157383 - RNA, 22 nt, synthetic construct
  source 1..22: mol_type = other RNA
ttgccagttttctggaaactca

SEQ ID NO: 157384 - RNA, 22 nt, synthetic construct
  source 1..22: mol_type = other RNA
ttgccatatgtagggcaccgtg

SEQ ID NO: 157385 - RNA, 22 nt, synthetic construct
  source 1..22: mol_type = other RNA
ttgccatcattttatgaaacca

SEQ ID NO: 157386 - RNA, 22 nt, synthetic construct
  source 1..22: mol_type = other RNA
ttgccatcttcaagatttcata

SEQ ID NO: 157387 - RNA, 22 nt, synthetic construct
  source 1..22: mol_type = other RNA
ttgccatcttgcataagttttt

SEQ ID NO: 157388 - RNA, 22 nt, synthetic construct
  source 1..22: mol_type = other RNA
ttgccattctcccagttgtcag

SEQ ID NO: 157389 - RNA, 22 nt, synthetic construct
  source 1..22: mol_type = other RNA
ttgcccactcttatatcctaaa

SEQ ID NO: 157390 - RNA, 22 nt, synthetic construct
  source 1..22: mol_type = other RNA
ttgcccagactggagttcactg

SEQ ID NO: 157391 - RNA, 22 nt, synthetic construct
  source 1..22: mol_type = other RNA
ttgcccaggctggtcttgtact

SEQ ID NO: 157392 - RNA, 22 nt, synthetic construct
  source 1..22: mol_type = other RNA
ttgcccattataaaataggaag

SEQ ID NO: 157393 - RNA, 22 nt, synthetic construct
  source 1..22: mol_type = other RNA
ttgccccattgcactccacgtg

SEQ ID NO: 157394 - RNA, 22 nt, synthetic construct
  source 1..22: mol_type = other RNA
ttgcctaacaccagtaagattc

SEQ ID NO: 157395 - RNA, 22 nt, synthetic construct
  source 1..22: mol_type = other RNA
ttgcctaagtctcaggatacaa

SEQ ID NO: 157396 - RNA, 22 nt, synthetic construct
  source 1..22: mol_type = other RNA
ttgcctactagccagtgattgg

SEQ ID NO: 157397 - RNA, 22 nt, synthetic construct
  source 1..22: mol_type = other RNA
ttgcctatagacagcatcccca

SEQ ID NO: 157398 - RNA, 22 nt, synthetic construct
  source 1..22: mol_type = other RNA
ttgcctattctggggctcaagt

SEQ ID NO: 157399 - RNA, 22 nt, synthetic construct
  source 1..22: mol_type = other RNA
ttgcctccatatgggatgctta

SEQ ID NO: 157400 - RNA, 22 nt, synthetic construct
  source 1..22: mol_type = other RNA
ttgcctcctgggttcaggtgcc

SEQ ID NO: 157401 - RNA, 22 nt, synthetic construct
  source 1..22: mol_type = other RNA
ttgcctctccagggaggaatcc

SEQ ID NO: 157402 - RNA, 22 nt, synthetic construct
  source 1..22: mol_type = other RNA
ttgcctctgtgctagccttctt

SEQ ID NO: 157403 - RNA, 22 nt, synthetic construct
  source 1..22: mol_type = other RNA
ttgcctctttgctaataagtga

SEQ ID NO: 157404 - RNA, 22 nt, synthetic construct
  source 1..22: mol_type = other RNA
ttgcctgacagcaaataaacaa

SEQ ID NO: 157405 - RNA, 22 nt, synthetic construct
  source 1..22: mol_type = other RNA
ttgcctgcgtccgtagaccgag

SEQ ID NO: 157406 - RNA, 22 nt, synthetic construct
  source 1..22: mol_type = other RNA
ttgcctggatgaatgcagtggc

SEQ ID NO: 157407 - RNA, 22 nt, synthetic construct
  source 1..22: mol_type = other RNA
ttgcctgtagttttggtgtcat

SEQ ID NO: 157408 - RNA, 22 nt, synthetic construct
  source 1..22: mol_type = other RNA
ttgccttcaagttgctttttct

SEQ ID NO: 157409 - RNA, 22 nt, synthetic construct
  source 1..22: mol_type = other RNA
ttgccttcgcagggtgaaactt

SEQ ID NO: 157410 - RNA, 22 nt, synthetic construct
  source 1..22: mol_type = other RNA
ttgcctttcactttgatcatac

SEQ ID NO: 157411 - RNA, 22 nt, synthetic construct
  source 1..22: mol_type = other RNA
ttgcctttcgcttttggagcta

SEQ ID NO: 157412 - RNA, 22 nt, synthetic construct
  source 1..22: mol_type = other RNA
ttgccttttcactcttagtgat

SEQ ID NO: 157413 - RNA, 22 nt, synthetic construct
  source 1..22: mol_type = other RNA
ttgcgaaacacactcgtgtatg

SEQ ID NO: 157414 - RNA, 22 nt, synthetic construct
  source 1..22: mol_type = other RNA
ttgcgaaatagtagttgctcag

SEQ ID NO: 157415 - RNA, 22 nt, synthetic construct
  source 1..22: mol_type = other RNA
ttgcgattgtttcagtgtgtcc

SEQ ID NO: 157416 - RNA, 22 nt, synthetic construct
  source 1..22: mol_type = other RNA
ttgcgcagaactggggcttgaa

SEQ ID NO: 157417 - RNA, 22 nt, synthetic construct
  source 1..22: mol_type = other RNA
ttgcgcgtcaaaagatgctggt

SEQ ID NO: 157418 - RNA, 22 nt, synthetic construct
  source 1..22: mol_type = other RNA
ttgcggcttgattagcttcctc

SEQ ID NO: 157419 - RNA, 22 nt, synthetic construct
  source 1..22: mol_type = other RNA
ttgcggtcttttagccaacaac

SEQ ID NO: 157420 - RNA, 22 nt, synthetic construct
  source 1..22: mol_type = other RNA
ttgcggtgacgtgagatcatgc

SEQ ID NO: 157421 - RNA, 22 nt, synthetic construct
  source 1..22: mol_type = other RNA
ttgcgtctgtgattatcaggga

SEQ ID NO: 157422 - RNA, 22 nt, synthetic construct
  source 1..22: mol_type = other RNA
ttgctaaactgttccccaagcc

SEQ ID NO: 157423 - RNA, 22 nt, synthetic construct
  source 1..22: mol_type = other RNA
ttgctaataagtgagtttgacc

SEQ ID NO: 157424 - RNA, 22 nt, synthetic construct
  source 1..22: mol_type = other RNA
ttgctaataatgatgactatga

SEQ ID NO: 157425 - RNA, 22 nt, synthetic construct
  source 1..22: mol_type = other RNA
ttgctaattcattgtacatgaa

SEQ ID NO: 157426 - RNA, 22 nt, synthetic construct
  source 1..22: mol_type = other RNA
ttgctagagctgctgtaacaaa

SEQ ID NO: 157427 - RNA, 22 nt, synthetic construct
  source 1..22: mol_type = other RNA
ttgctagtagcagaatccccaa

SEQ ID NO: 157428 - RNA, 22 nt, synthetic construct
  source 1..22: mol_type = other RNA
ttgctagtattttgttgacatc

SEQ ID NO: 157429 - RNA, 22 nt, synthetic construct
  source 1..22: mol_type = other RNA
ttgctagtggtaactagatgcc

SEQ ID NO: 157430 - RNA, 22 nt, synthetic construct
  source 1..22: mol_type = other RNA
ttgctagtgtcctcaggctcca

SEQ ID NO: 157431 - RNA, 22 nt, synthetic construct
  source 1..22: mol_type = other RNA
ttgctatccagtctctgcaaca

SEQ ID NO: 157432 - RNA, 22 nt, synthetic construct
  source 1..22: mol_type = other RNA
ttgctatgtaatctcatggaag

SEQ ID NO: 157433 - RNA, 22 nt, synthetic construct
  source 1..22: mol_type = other RNA
ttgctattcaacaggtataaag

SEQ ID NO: 157434 - RNA, 22 nt, synthetic construct
  source 1..22: mol_type = other RNA
ttgctattgttgaattgttgga

SEQ ID NO: 157435 - RNA, 22 nt, synthetic construct
  source 1..22: mol_type = other RNA
ttgctcacacttactaaatgat

SEQ ID NO: 157436 - RNA, 22 nt, synthetic construct
  source 1..22: mol_type = other RNA
ttgctcagaaaattttcttttg

SEQ ID NO: 157437 - RNA, 22 nt, synthetic construct
  source 1..22: mol_type = other RNA
ttgctcaggagtaactgctcct

SEQ ID NO: 157438 - RNA, 22 nt, synthetic construct
  source 1..22: mol_type = other RNA
ttgctcattcatctgcagtgtc

SEQ ID NO: 157439 - RNA, 22 nt, synthetic construct
  source 1..22: mol_type = other RNA
ttgctccagagaagttttccag

SEQ ID NO: 157440 - RNA, 22 nt, synthetic construct
  source 1..22: mol_type = other RNA
ttgctctacaaaccttcttatt

SEQ ID NO: 157441 - RNA, 22 nt, synthetic construct
  source 1..22: mol_type = other RNA
ttgctctcttgcccaagctggt

SEQ ID NO: 157442 - RNA, 22 nt, synthetic construct
  source 1..22: mol_type = other RNA
ttgctctcttgcctaggctgga

SEQ ID NO: 157443 - RNA, 22 nt, synthetic construct
  source 1..22: mol_type = other RNA
ttgctctgcaaatgaggttgct

SEQ ID NO: 157444 - RNA, 22 nt, synthetic construct
  source 1..22: mol_type = other RNA
ttgctctgcggcaggcattgtg

SEQ ID NO: 157445 - RNA, 22 nt, synthetic construct
  source 1..22: mol_type = other RNA
ttgctctgtcacccacgtggag

SEQ ID NO: 157446 - RNA, 22 nt, synthetic construct
  source 1..22: mol_type = other RNA
ttgctgaagaataactgtcctg

SEQ ID NO: 157447 - RNA, 22 nt, synthetic construct
  source 1..22: mol_type = other RNA
ttgctgacttcctggctctagc

SEQ ID NO: 157448 - RNA, 22 nt, synthetic construct
  source 1..22: mol_type = other RNA
ttgctgagggaatttttcttac

SEQ ID NO: 157449 - RNA, 22 nt, synthetic construct
  source 1..22: mol_type = other RNA
ttgctgcactggctattagtta

SEQ ID NO: 157450 - RNA, 22 nt, synthetic construct
  source 1..22: mol_type = other RNA
ttgctgcagtttttccactaat

SEQ ID NO: 157451 - RNA, 22 nt, synthetic construct
  source 1..22: mol_type = other RNA
ttgctgcatagtactccattat

SEQ ID NO: 157452 - RNA, 22 nt, synthetic construct
  source 1..22: mol_type = other RNA
ttgctgcatcccaagggttttg

SEQ ID NO: 157453 - RNA, 22 nt, synthetic construct
  source 1..22: mol_type = other RNA
ttgctgccaagtcagcacttct

SEQ ID NO: 157454 - RNA, 22 nt, synthetic construct
  source 1..22: mol_type = other RNA
ttgctgccccagctaaaatgtt

SEQ ID NO: 157455 - RNA, 22 nt, synthetic construct
  source 1..22: mol_type = other RNA
ttgctgcttctacccactattg

SEQ ID NO: 157456 - RNA, 22 nt, synthetic construct
  source 1..22: mol_type = other RNA
ttgctggaagttggcccaacat

SEQ ID NO: 157457 - RNA, 22 nt, synthetic construct
  source 1..22: mol_type = other RNA
ttgctggctcagtctgtttgcc

SEQ ID NO: 157458 - RNA, 22 nt, synthetic construct
  source 1..22: mol_type = other RNA
ttgctgtataacattttctcta

SEQ ID NO: 157459 - RNA, 22 nt, synthetic construct
  source 1..22: mol_type = other RNA
ttgctgtatacccaggtgtgag

SEQ ID NO: 157460 - RNA, 22 nt, synthetic construct
  source 1..22: mol_type = other RNA
ttgctgtcaggcaagggactgt

SEQ ID NO: 157461 - RNA, 22 nt, synthetic construct
  source 1..22: mol_type = other RNA
ttgctgttgtaatgttacttct

SEQ ID NO: 157462 - RNA, 22 nt, synthetic construct
  source 1..22: mol_type = other RNA
ttgcttaaagttggtcctgcat

SEQ ID NO: 157463 - RNA, 22 nt, synthetic construct
  source 1..22: mol_type = other RNA
ttgcttaagtcactccatttgt

SEQ ID NO: 157464 - RNA, 22 nt, synthetic construct
  source 1..22: mol_type = other RNA
ttgcttaattgagctgtcccca

SEQ ID NO: 157465 - RNA, 22 nt, synthetic construct
  source 1..22: mol_type = other RNA
ttgcttactctaatggggaaat

SEQ ID NO: 157466 - RNA, 22 nt, synthetic construct
  source 1..22: mol_type = other RNA
ttgcttactgtagcattgaagt

SEQ ID NO: 157467 - RNA, 22 nt, synthetic construct
  source 1..22: mol_type = other RNA
ttgcttaggctgaagcaggctt

SEQ ID NO: 157468 - RNA, 22 nt, synthetic construct
  source 1..22: mol_type = other RNA
ttgcttaggctgttattagagt

SEQ ID NO: 157469 - RNA, 22 nt, synthetic construct
  source 1..22: mol_type = other RNA
ttgcttataacaagaaaatctg

SEQ ID NO: 157470 - RNA, 22 nt, synthetic construct
  source 1..22: mol_type = other RNA
ttgcttcaaagagaacaaaata

SEQ ID NO: 157471 - RNA, 22 nt, synthetic construct
  source 1..22: mol_type = other RNA
ttgcttcccacttcgaaagttc

SEQ ID NO: 157472 - RNA, 22 nt, synthetic construct
  source 1..22: mol_type = other RNA
ttgcttcgaagcttattaaaat

SEQ ID NO: 157473 - RNA, 22 nt, synthetic construct
  source 1..22: mol_type = other RNA
ttgcttgagagagataaaacct

SEQ ID NO: 157474 - RNA, 22 nt, synthetic construct
  source 1..22: mol_type = other RNA
ttgcttgagtgcaggagtttga

SEQ ID NO: 157475 - RNA, 22 nt, synthetic construct
  source 1..22: mol_type = other RNA
ttgcttgctctacaaaccttct

SEQ ID NO: 157476 - RNA, 22 nt, synthetic construct
  source 1..22: mol_type = other RNA
ttgcttggcacagaattattga

SEQ ID NO: 157477 - RNA, 22 nt, synthetic construct
  source 1..22: mol_type = other RNA
ttgcttgggaacagcaggggaa

SEQ ID NO: 157478 - RNA, 22 nt, synthetic construct
  source 1..22: mol_type = other RNA
ttgcttggtgttgactgaatta

SEQ ID NO: 157479 - RNA, 22 nt, synthetic construct
  source 1..22: mol_type = other RNA
ttgcttggtttcacacgcattg

SEQ ID NO: 157480 - RNA, 22 nt, synthetic construct
  source 1..22: mol_type = other RNA
ttgcttgtcttgaatagcatct

SEQ ID NO: 157481 - RNA, 22 nt, synthetic construct
  source 1..22: mol_type = other RNA
ttgctttaacctctggtatttt

SEQ ID NO: 157482 - RNA, 22 nt, synthetic construct
  source 1..22: mol_type = other RNA
ttgctttactactgcatttttt

SEQ ID NO: 157483 - RNA, 22 nt, synthetic construct
  source 1..22: mol_type = other RNA
ttgctttgaatttggaaagggt

SEQ ID NO: 157484 - RNA, 22 nt, synthetic construct
  source 1..22: mol_type = other RNA
ttgctttgcgaaatagtagttg

SEQ ID NO: 157485 - RNA, 22 nt, synthetic construct
  source 1..22: mol_type = other RNA
ttgctttgctgccccagctaaa

SEQ ID NO: 157486 - RNA, 22 nt, synthetic construct
  source 1..22: mol_type = other RNA
ttgctttggagtcacagtgaat

SEQ ID NO: 157487 - RNA, 22 nt, synthetic construct
  source 1..22: mol_type = other RNA
ttgctttggagtgagaggactg

SEQ ID NO: 157488 - RNA, 22 nt, synthetic construct
  source 1..22: mol_type = other RNA
ttgctttggctagaagcatctg

SEQ ID NO: 157489 - RNA, 22 nt, synthetic construct
  source 1..22: mol_type = other RNA
ttgctttgggtctatagtttaa

SEQ ID NO: 157490 - RNA, 22 nt, synthetic construct
  source 1..22: mol_type = other RNA
ttgcttttacttggctcctccc

SEQ ID NO: 157491 - RNA, 22 nt, synthetic construct
  source 1..22: mol_type = other RNA
ttgcttttcctggaaaacttct

SEQ ID NO: 157492 - RNA, 22 nt, synthetic construct
  source 1..22: mol_type = other RNA
ttgcttttgctgagggaatttt

SEQ ID NO: 157493 - RNA, 22 nt, synthetic construct
  source 1..22: mol_type = other RNA
ttgcttttgctttgggtctata

SEQ ID NO: 157494 - RNA, 22 nt, synthetic construct
  source 1..22: mol_type = other RNA
ttgctttttcttcttgttttgt

SEQ ID NO: 157495 - RNA, 22 nt, synthetic construct
  source 1..22: mol_type = other RNA
ttggaaaaatcgtcctcttcgg

SEQ ID NO: 157496 - RNA, 22 nt, synthetic construct
  source 1..22: mol_type = other RNA
ttggaaaaatgtccgttgaagt

SEQ ID NO: 157497 - RNA, 22 nt, synthetic construct
  source 1..22: mol_type = other RNA
ttggaaaacaaattgcatcaac

SEQ ID NO: 157498 - RNA, 22 nt, synthetic construct
  source 1..22: mol_type = other RNA
ttggaaaactaggtatttgaaa

SEQ ID NO: 157499 - RNA, 22 nt, synthetic construct
  source 1..22: mol_type = other RNA
ttggaaaactctgtttccttac

SEQ ID NO: 157500 - RNA, 22 nt, synthetic construct
  source 1..22: mol_type = other RNA
ttggaaaagaaagctgtggatg

SEQ ID NO: 157501 - RNA, 22 nt, synthetic construct
  source 1..22: mol_type = other RNA
ttggaaagggtagagcactttc

SEQ ID NO: 157502 - RNA, 22 nt, synthetic construct
  source 1..22: mol_type = other RNA
ttggaaatatggtcactgctga

SEQ ID NO: 157503 - RNA, 22 nt, synthetic construct
  source 1..22: mol_type = other RNA
ttggaaatgatacctcatttat

SEQ ID NO: 157504 - RNA, 22 nt, synthetic construct
  source 1..22: mol_type = other RNA
ttggaaattagaaatgtggaag

SEQ ID NO: 157505 - RNA, 22 nt, synthetic construct
  source 1..22: mol_type = other RNA
ttggaacctttgtccactgtca

SEQ ID NO: 157506 - RNA, 22 nt, synthetic construct
  source 1..22: mol_type = other RNA
ttggaactcttgcggtctttta

SEQ ID NO: 157507 - RNA, 22 nt, synthetic construct
  source 1..22: mol_type = other RNA
ttggaagactatcacgattctg

SEQ ID NO: 157508 - RNA, 22 nt, synthetic construct
  source 1..22: mol_type = other RNA
ttggaagactatgagaaggatt

SEQ ID NO: 157509 - RNA, 22 nt, synthetic construct
  source 1..22: mol_type = other RNA
ttggaagagagaaggctgccag

SEQ ID NO: 157510 - RNA, 22 nt, synthetic construct
  source 1..22: mol_type = other RNA
ttggaagcatgtggccaggagg

SEQ ID NO: 157511 - RNA, 22 nt, synthetic construct
  source 1..22: mol_type = other RNA
ttggaaggtaggagggtgtgat

SEQ ID NO: 157512 - RNA, 22 nt, synthetic construct
  source 1..22: mol_type = other RNA
ttggaagtgaagtcaagatgaa

SEQ ID NO: 157513 - RNA, 22 nt, synthetic construct
  source 1..22: mol_type = other RNA
ttggaagtttctggaagtttcc

SEQ ID NO: 157514 - RNA, 22 nt, synthetic construct
  source 1..22: mol_type = other RNA
ttggaatagagagcccagaaat

SEQ ID NO: 157515 - RNA, 22 nt, synthetic construct
  source 1..22: mol_type = other RNA
ttggaatgagtccagctttcta

SEQ ID NO: 157516 - RNA, 22 nt, synthetic construct
  source 1..22: mol_type = other RNA
ttggaatgtgcacctccagtgt

SEQ ID NO: 157517 - RNA, 22 nt, synthetic construct
  source 1..22: mol_type = other RNA
ttggaattaaaatgttgccaat

SEQ ID NO: 157518 - RNA, 22 nt, synthetic construct
  source 1..22: mol_type = other RNA
ttggaatttaaggggtaaatgg

SEQ ID NO: 157519 - RNA, 22 nt, synthetic construct
  source 1..22: mol_type = other RNA
ttggaattttagtaattctcca

SEQ ID NO: 157520 - RNA, 22 nt, synthetic construct
  source 1..22: mol_type = other RNA
ttggacagctgggagaaagcta

SEQ ID NO: 157521 - RNA, 22 nt, synthetic construct
  source 1..22: mol_type = other RNA
ttggacaggggacatgaaggaa

SEQ ID NO: 157522 - RNA, 22 nt, synthetic construct
  source 1..22: mol_type = other RNA
ttggacccatgcccatgtgcat

SEQ ID NO: 157523 - RNA, 22 nt, synthetic construct
  source 1..22: mol_type = other RNA
ttggacgggtggtagggagggg

SEQ ID NO: 157524 - RNA, 22 nt, synthetic construct
  source 1..22: mol_type = other RNA
ttggactccaccctgcccctta

SEQ ID NO: 157525 - RNA, 22 nt, synthetic construct
  source 1..22: mol_type = other RNA
ttggagaacttaaaggtttgga

SEQ ID NO: 157526 - RNA, 22 nt, synthetic construct
  source 1..22: mol_type = other RNA
ttggagaagagttctgaaggct

SEQ ID NO: 157527 - RNA, 22 nt, synthetic construct
  source 1..22: mol_type = other RNA
ttggagacagcctaaaccattt

SEQ ID NO: 157528 - RNA, 22 nt, synthetic construct
  source 1..22: mol_type = other RNA
ttggagactgataaacttcagt

SEQ ID NO: 157529 - RNA, 22 nt, synthetic construct
  source 1..22: mol_type = other RNA
ttggagagaaaccttggtgtgc

SEQ ID NO: 157530 - RNA, 22 nt, synthetic construct
  source 1..22: mol_type = other RNA
ttggagagatggtagtcaacac

SEQ ID NO: 157531 - RNA, 22 nt, synthetic construct
  source 1..22: mol_type = other RNA
ttggagctataatttatctgga

SEQ ID NO: 157532 - RNA, 22 nt, synthetic construct
  source 1..22: mol_type = other RNA
ttggagctgtatttttgctcac

SEQ ID NO: 157533 - RNA, 22 nt, synthetic construct
  source 1..22: mol_type = other RNA
ttggaggagaaggccttccacg

SEQ ID NO: 157534 - RNA, 22 nt, synthetic construct
  source 1..22: mol_type = other RNA
ttggaggagccctgctgtggcc

SEQ ID NO: 157535 - RNA, 22 nt, synthetic construct
  source 1..22: mol_type = other RNA
ttggaggataatatctggactg

SEQ ID NO: 157536 - RNA, 22 nt, synthetic construct
  source 1..22: mol_type = other RNA
ttggagtaaacctgcaattttt

SEQ ID NO: 157537 - RNA, 22 nt, synthetic construct
  source 1..22: mol_type = other RNA
ttggagtcacagtgaattctga

SEQ ID NO: 157538 - RNA, 22 nt, synthetic construct
  source 1..22: mol_type = other RNA
ttggagtcacttgacaaaaatt

SEQ ID NO: 157539 - RNA, 22 nt, synthetic construct
  source 1..22: mol_type = other RNA
ttggagtgagaggactgcctgg

SEQ ID NO: 157540 - RNA, 22 nt, synthetic construct
  source 1..22: mol_type = other RNA
ttggagtttgtagctcaaagca

SEQ ID NO: 157541 - RNA, 22 nt, synthetic construct
  source 1..22: mol_type = other RNA
ttggagttttccccctacaccc

SEQ ID NO: 157542 - RNA, 22 nt, synthetic construct
  source 1..22: mol_type = other RNA
ttggatagtttctcaacttagc

SEQ ID NO: 157543 - RNA, 22 nt, synthetic construct
  source 1..22: mol_type = other RNA
ttggatatccccatttttctcg

SEQ ID NO: 157544 - RNA, 22 nt, synthetic construct
  source 1..22: mol_type = other RNA
ttggatattctacagaaaaccc

SEQ ID NO: 157545 - RNA, 22 nt, synthetic construct
  source 1..22: mol_type = other RNA
ttggatatttgcagtagtattg

SEQ ID NO: 157546 - RNA, 22 nt, synthetic construct
  source 1..22: mol_type = other RNA
ttggatcttatctgctgtcggt

SEQ ID NO: 157547 - RNA, 22 nt, synthetic construct
  source 1..22: mol_type = other RNA
ttggatgaaaaagtactggaaa

SEQ ID NO: 157548 - RNA, 22 nt, synthetic construct
  source 1..22: mol_type = other RNA
ttggatgaacgctaaattaaag

SEQ ID NO: 157549 - RNA, 22 nt, synthetic construct
  source 1..22: mol_type = other RNA
ttggatgcagatttctttttac

SEQ ID NO: 157550 - RNA, 22 nt, synthetic construct
  source 1..22: mol_type = other RNA
ttggattaagggcccaccctgc

SEQ ID NO: 157551 - RNA, 22 nt, synthetic construct
  source 1..22: mol_type = other RNA
ttggattcccaggtattttgtt

SEQ ID NO: 157552 - RNA, 22 nt, synthetic construct
  source 1..22: mol_type = other RNA
ttggattgcgattgtttcagtg

SEQ ID NO: 157553 - RNA, 22 nt, synthetic construct
  source 1..22: mol_type = other RNA
ttggattgctaaactgttcccc

SEQ ID NO: 157554 - RNA, 22 nt, synthetic construct
  source 1..22: mol_type = other RNA
ttggattgtgtgtcgagaaaaa

SEQ ID NO: 157555 - RNA, 22 nt, synthetic construct
  source 1..22: mol_type = other RNA
ttggatttatctttctagattc

SEQ ID NO: 157556 - RNA, 22 nt, synthetic construct
  source 1..22: mol_type = other RNA
ttggatttgagtaactaaacta

SEQ ID NO: 157557 - RNA, 22 nt, synthetic construct
  source 1..22: mol_type = other RNA
ttggcaaaaaatgcagtagtaa

SEQ ID NO: 157558 - RNA, 22 nt, synthetic construct
  source 1..22: mol_type = other RNA
ttggcaaacttagaatataaac

SEQ ID NO: 157559 - RNA, 22 nt, synthetic construct
  source 1..22: mol_type = other RNA
ttggcaaatctttagtgttgct

SEQ ID NO: 157560 - RNA, 22 nt, synthetic construct
  source 1..22: mol_type = other RNA
ttggcaaattgtcagattttct

SEQ ID NO: 157561 - RNA, 22 nt, synthetic construct
  source 1..22: mol_type = other RNA
ttggcaacattttaattccaaa

SEQ ID NO: 157562 - RNA, 22 nt, synthetic construct
  source 1..22: mol_type = other RNA
ttggcaaggggaatggtactgc

SEQ ID NO: 157563 - RNA, 22 nt, synthetic construct
  source 1..22: mol_type = other RNA
ttggcacagaattattgattgg

SEQ ID NO: 157564 - RNA, 22 nt, synthetic construct
  source 1..22: mol_type = other RNA
ttggcacagccagtcagtgatg

SEQ ID NO: 157565 - RNA, 22 nt, synthetic construct
  source 1..22: mol_type = other RNA
ttggcacaggagagcgacagct

SEQ ID NO: 157566 - RNA, 22 nt, synthetic construct
  source 1..22: mol_type = other RNA
ttggcactgaagccagtccttg

SEQ ID NO: 157567 - RNA, 22 nt, synthetic construct
  source 1..22: mol_type = other RNA
ttggcagcgtaactccatcttc

SEQ ID NO: 157568 - RNA, 22 nt, synthetic construct
  source 1..22: mol_type = other RNA
ttggcataaagacagacatttg

SEQ ID NO: 157569 - RNA, 22 nt, synthetic construct
  source 1..22: mol_type = other RNA
ttggcatacaactgctcataat

SEQ ID NO: 157570 - RNA, 22 nt, synthetic construct
  source 1..22: mol_type = other RNA
ttggcatttaaaagaacctctg

SEQ ID NO: 157571 - RNA, 22 nt, synthetic construct
  source 1..22: mol_type = other RNA
ttggccaacatggcgaaacgcc

SEQ ID NO: 157572 - RNA, 22 nt, synthetic construct
  source 1..22: mol_type = other RNA
ttggccagaatccctttcgcta

SEQ ID NO: 157573 - RNA, 22 nt, synthetic construct
  source 1..22: mol_type = other RNA
ttggccaggctggttccaaact

SEQ ID NO: 157574 - RNA, 22 nt, synthetic construct
  source 1..22: mol_type = other RNA
ttggccattttcttttaaatgt

SEQ ID NO: 157575 - RNA, 22 nt, synthetic construct
  source 1..22: mol_type = other RNA
ttggcccaacatgctcttaagt

SEQ ID NO: 157576 - RNA, 22 nt, synthetic construct
  source 1..22: mol_type = other RNA
ttggcccagccatcccattact

SEQ ID NO: 157577 - RNA, 22 nt, synthetic construct
  source 1..22: mol_type = other RNA
ttggcccatatccttttatgtg

SEQ ID NO: 157578 - RNA, 22 nt, synthetic construct
  source 1..22: mol_type = other RNA
ttggcccattttcgaattagat

SEQ ID NO: 157579 - RNA, 22 nt, synthetic construct
  source 1..22: mol_type = other RNA
ttggccgaatgtggtggtatgc

SEQ ID NO: 157580 - RNA, 22 nt, synthetic construct
  source 1..22: mol_type = other RNA
ttggccgaggccagtccctagt

SEQ ID NO: 157581 - RNA, 22 nt, synthetic construct
  source 1..22: mol_type = other RNA
ttggcctccccaagtgctgtga

SEQ ID NO: 157582 - RNA, 22 nt, synthetic construct
  source 1..22: mol_type = other RNA
ttggcctctgcggcggctgagg

SEQ ID NO: 157583 - RNA, 22 nt, synthetic construct
  source 1..22: mol_type = other RNA
ttggcctggacacacacagtcc

SEQ ID NO: 157584 - RNA, 22 nt, synthetic construct
  source 1..22: mol_type = other RNA
ttggccttctgaggagctgaga

SEQ ID NO: 157585 - RNA, 22 nt, synthetic construct
  source 1..22: mol_type = other RNA
ttggccttgaggtgagacagac

SEQ ID NO: 157586 - RNA, 22 nt, synthetic construct
  source 1..22: mol_type = other RNA
ttggcgcagtgcttagcgctgg

SEQ ID NO: 157587 - RNA, 22 nt, synthetic construct
  source 1..22: mol_type = other RNA
ttggcgtacatgtagatatggg

SEQ ID NO: 157588 - RNA, 22 nt, synthetic construct
  source 1..22: mol_type = other RNA
ttggctaaaagaccgcaagagt

SEQ ID NO: 157589 - RNA, 22 nt, synthetic construct
  source 1..22: mol_type = other RNA
ttggctactgtaaacaatgctg

SEQ ID NO: 157590 - RNA, 22 nt, synthetic construct
  source 1..22: mol_type = other RNA
ttggctagaagcatctgataca

SEQ ID NO: 157591 - RNA, 22 nt, synthetic construct
  source 1..22: mol_type = other RNA
ttggctagactaagaaaaacag

SEQ ID NO: 157592 - RNA, 22 nt, synthetic construct
  source 1..22: mol_type = other RNA
ttggctattgtcagtaattctg

SEQ ID NO: 157593 - RNA, 22 nt, synthetic construct
  source 1..22: mol_type = other RNA
ttggctcaatggttaagactgc

SEQ ID NO: 157594 - RNA, 22 nt, synthetic construct
  source 1..22: mol_type = other RNA
ttggctcccatgattcaaaatg

SEQ ID NO: 157595 - RNA, 22 nt, synthetic construct
  source 1..22: mol_type = other RNA
ttggctcctcccggctaagatg

SEQ ID NO: 157596 - RNA, 22 nt, synthetic construct
  source 1..22: mol_type = other RNA
ttggctccttaccactataatc

SEQ ID NO: 157597 - RNA, 22 nt, synthetic construct
  source 1..22: mol_type = other RNA
ttggctcttagaaaatatatac

SEQ ID NO: 157598 - RNA, 22 nt, synthetic construct
  source 1..22: mol_type = other RNA
ttggctgaaatgctgtaactga

SEQ ID NO: 157599 - RNA, 22 nt, synthetic construct
  source 1..22: mol_type = other RNA
ttggctgggagcttatcaggct

SEQ ID NO: 157600 - RNA, 22 nt, synthetic construct
  source 1..22: mol_type = other RNA
ttggctgttaccatttgacctt

SEQ ID NO: 157601 - RNA, 22 nt, synthetic construct
  source 1..22: mol_type = other RNA
ttggctgttagccttgccattc

SEQ ID NO: 157602 - RNA, 22 nt, synthetic construct
  source 1..22: mol_type = other RNA
ttggcttatagtgttctttttt

SEQ ID NO: 157603 - RNA, 22 nt, synthetic construct
  source 1..22: mol_type = other RNA
ttggcttggggaacagtttagc

SEQ ID NO: 157604 - RNA, 22 nt, synthetic construct
  source 1..22: mol_type = other RNA
ttggctttagatttatcaatag

SEQ ID NO: 157605 - RNA, 22 nt, synthetic construct
  source 1..22: mol_type = other RNA
ttggcttttggcagcgtaactc

SEQ ID NO: 157606 - RNA, 22 nt, synthetic construct
  source 1..22: mol_type = other RNA
ttgggaaaatctctgacttcat

SEQ ID NO: 157607 - RNA, 22 nt, synthetic construct
  source 1..22: mol_type = other RNA
ttgggaaaatcttggaactttt

SEQ ID NO: 157608 - RNA, 22 nt, synthetic construct
  source 1..22: mol_type = other RNA
ttgggaacagcaggggaaggct

SEQ ID NO: 157609 - RNA, 22 nt, synthetic construct
  source 1..22: mol_type = other RNA
ttgggaagattggctttagatt

SEQ ID NO: 157610 - RNA, 22 nt, synthetic construct
  source 1..22: mol_type = other RNA
ttgggaaggatggccagtcatg

SEQ ID NO: 157611 - RNA, 22 nt, synthetic construct
  source 1..22: mol_type = other RNA
ttgggaaggccctgattgagat

SEQ ID NO: 157612 - RNA, 22 nt, synthetic construct
  source 1..22: mol_type = other RNA
ttgggaatactttcccatctct

SEQ ID NO: 157613 - RNA, 22 nt, synthetic construct
  source 1..22: mol_type = other RNA
ttgggaatgtggtcacactttt

SEQ ID NO: 157614 - RNA, 22 nt, synthetic construct
  source 1..22: mol_type = other RNA
ttgggactgagacagtattgtg

SEQ ID NO: 157615 - RNA, 22 nt, synthetic construct
  source 1..22: mol_type = other RNA
ttgggagaaaatttttacagtc

SEQ ID NO: 157616 - RNA, 22 nt, synthetic construct
  source 1..22: mol_type = other RNA
ttgggagctttcattattacca

SEQ ID NO: 157617 - RNA, 22 nt, synthetic construct
  source 1..22: mol_type = other RNA
ttgggaggctgaggcaggtgga

SEQ ID NO: 157618 - RNA, 22 nt, synthetic construct
  source 1..22: mol_type = other RNA
ttgggaggctgaggcggaagga

SEQ ID NO: 157619 - RNA, 22 nt, synthetic construct
  source 1..22: mol_type = other RNA
ttgggaggctgaggctggggaa

SEQ ID NO: 157620 - RNA, 22 nt, synthetic construct
  source 1..22: mol_type = other RNA
ttgggaggtttttgattactga

SEQ ID NO: 157621 - RNA, 22 nt, synthetic construct
  source 1..22: mol_type = other RNA
ttgggagtctatttctgaacaa

SEQ ID NO: 157622 - RNA, 22 nt, synthetic construct
  source 1..22: mol_type = other RNA
ttgggatatagctacaatgatt

SEQ ID NO: 157623 - RNA, 22 nt, synthetic construct
  source 1..22: mol_type = other RNA
ttgggatcacacttgatggttt

SEQ ID NO: 157624 - RNA, 22 nt, synthetic construct
  source 1..22: mol_type = other RNA
ttgggatctgataaattattag

SEQ ID NO: 157625 - RNA, 22 nt, synthetic construct
  source 1..22: mol_type = other RNA
ttgggatctgtcatgtttgaat

SEQ ID NO: 157626 - RNA, 22 nt, synthetic construct
  source 1..22: mol_type = other RNA
ttgggatgcagcaaaagcacca

SEQ ID NO: 157627 - RNA, 22 nt, synthetic construct
  source 1..22: mol_type = other RNA
ttgggatgtttctacctttggc

SEQ ID NO: 157628 - RNA, 22 nt, synthetic construct
  source 1..22: mol_type = other RNA
ttgggattacaggcatgagcca

SEQ ID NO: 157629 - RNA, 22 nt, synthetic construct
  source 1..22: mol_type = other RNA
ttgggattagcttattcttttt

SEQ ID NO: 157630 - RNA, 22 nt, synthetic construct
  source 1..22: mol_type = other RNA
ttgggcaagagagcaagtcccc

SEQ ID NO: 157631 - RNA, 22 nt, synthetic construct
  source 1..22: mol_type = other RNA
ttgggcacactccccagtggtt

SEQ ID NO: 157632 - RNA, 22 nt, synthetic construct
  source 1..22: mol_type = other RNA
ttgggcattaattgagagcttt

SEQ ID NO: 157633 - RNA, 22 nt, synthetic construct
  source 1..22: mol_type = other RNA
ttgggccaacttccagcaagac

SEQ ID NO: 157634 - RNA, 22 nt, synthetic construct
  source 1..22: mol_type = other RNA
ttgggcctttctgtttgtttgt

SEQ ID NO: 157635 - RNA, 22 nt, synthetic construct
  source 1..22: mol_type = other RNA
ttgggctaaggtggagtggtgg

SEQ ID NO: 157636 - RNA, 22 nt, synthetic construct
  source 1..22: mol_type = other RNA
ttgggctattaagtattgcatt

SEQ ID NO: 157637 - RNA, 22 nt, synthetic construct
  source 1..22: mol_type = other RNA
ttgggctcaagtgatccttctg

SEQ ID NO: 157638 - RNA, 22 nt, synthetic construct
  source 1..22: mol_type = other RNA
ttgggctcccttccagcgtgtg

SEQ ID NO: 157639 - RNA, 22 nt, synthetic construct
  source 1..22: mol_type = other RNA
ttgggcttaacatttgaactca

SEQ ID NO: 157640 - RNA, 22 nt, synthetic construct
  source 1..22: mol_type = other RNA
ttgggcttatcagatggtgata

SEQ ID NO: 157641 - RNA, 22 nt, synthetic construct
  source 1..22: mol_type = other RNA
ttgggcttggttggaaaagaaa

SEQ ID NO: 157642 - RNA, 22 nt, synthetic construct
  source 1..22: mol_type = other RNA
ttgggcttttcatatacgtatt

SEQ ID NO: 157643 - RNA, 22 nt, synthetic construct
  source 1..22: mol_type = other RNA
ttggggaacagtttagcaatcc

SEQ ID NO: 157644 - RNA, 22 nt, synthetic construct
  source 1..22: mol_type = other RNA
ttggggactcttatggctataa

SEQ ID NO: 157645 - RNA, 22 nt, synthetic construct
  source 1..22: mol_type = other RNA
ttggggagagtgggcccagcag

SEQ ID NO: 157646 - RNA, 22 nt, synthetic construct
  source 1..22: mol_type = other RNA
ttggggagataccttgaaagga

SEQ ID NO: 157647 - RNA, 22 nt, synthetic construct
  source 1..22: mol_type = other RNA
ttggggaggccaaggcaggact

SEQ ID NO: 157648 - RNA, 22 nt, synthetic construct
  source 1..22: mol_type = other RNA
ttggggattctgctactagcaa

SEQ ID NO: 157649 - RNA, 22 nt, synthetic construct
  source 1..22: mol_type = other RNA
ttggggccatctgaattcaagt

SEQ ID NO: 157650 - RNA, 22 nt, synthetic construct
  source 1..22: mol_type = other RNA
ttggggctaggatttcagtaaa

SEQ ID NO: 157651 - RNA, 22 nt, synthetic construct
  source 1..22: mol_type = other RNA
ttggggctctaatgcaagagtt

SEQ ID NO: 157652 - RNA, 22 nt, synthetic construct
  source 1..22: mol_type = other RNA
ttggggcttttgaacactctgc

SEQ ID NO: 157653 - RNA, 22 nt, synthetic construct
  source 1..22: mol_type = other RNA
ttgggggaaaattgacattttt

SEQ ID NO: 157654 - RNA, 22 nt, synthetic construct
  source 1..22: mol_type = other RNA
ttgggggaagagagcattgcct

SEQ ID NO: 157655 - RNA, 22 nt, synthetic construct
  source 1..22: mol_type = other RNA
ttgggggaagcaggaactcata

SEQ ID NO: 157656 - RNA, 22 nt, synthetic construct
  source 1..22: mol_type = other RNA
ttgggggctgggtcggccgagg

SEQ ID NO: 157657 - RNA, 22 nt, synthetic construct
  source 1..22: mol_type = other RNA
ttggggtatgtttgattagttg

SEQ ID NO: 157658 - RNA, 22 nt, synthetic construct
  source 1..22: mol_type = other RNA
ttgggtaatttatctccataag

SEQ ID NO: 157659 - RNA, 22 nt, synthetic construct
  source 1..22: mol_type = other RNA
ttgggtaggaagctgatcaagg

SEQ ID NO: 157660 - RNA, 22 nt, synthetic construct
  source 1..22: mol_type = other RNA
ttgggtataaatgatgagctac

SEQ ID NO: 157661 - RNA, 22 nt, synthetic construct
  source 1..22: mol_type = other RNA
ttgggtcaacaaactaactaga

SEQ ID NO: 157662 - RNA, 22 nt, synthetic construct
  source 1..22: mol_type = other RNA
ttgggtctatagtttaattggg

SEQ ID NO: 157663 - RNA, 22 nt, synthetic construct
  source 1..22: mol_type = other RNA
ttgggtgaataacccatatctt

SEQ ID NO: 157664 - RNA, 22 nt, synthetic construct
  source 1..22: mol_type = other RNA
ttgggtgacagagagagacctt

SEQ ID NO: 157665 - RNA, 22 nt, synthetic construct
  source 1..22: mol_type = other RNA
ttgggtgacctcatgtaactaa

SEQ ID NO: 157666 - RNA, 22 nt, synthetic construct
  source 1..22: mol_type = other RNA
ttgggtggaagctgtccttctc

SEQ ID NO: 157667 - RNA, 22 nt, synthetic construct
  source 1..22: mol_type = other RNA
ttgggtttaactgaggtgtttt

SEQ ID NO: 157668 - RNA, 22 nt, synthetic construct
  source 1..22: mol_type = other RNA
ttgggtttgagtttccagaaaa

SEQ ID NO: 157669 - RNA, 22 nt, synthetic construct
  source 1..22: mol_type = other RNA
ttggtaaaaagtgcttctagta

SEQ ID NO: 157670 - RNA, 22 nt, synthetic construct
  source 1..22: mol_type = other RNA
ttggtaaaatcactaattcaag

SEQ ID NO: 157671 - RNA, 22 nt, synthetic construct
  source 1..22: mol_type = other RNA
ttggtaaaatgtggcaaattta

SEQ ID NO: 157672 - RNA, 22 nt, synthetic construct
  source 1..22: mol_type = other RNA
ttggtaaacagcagtcttaacc

SEQ ID NO: 157673 - RNA, 22 nt, synthetic construct
  source 1..22: mol_type = other RNA
ttggtaagagtgagaccctgtc

SEQ ID NO: 157674 - RNA, 22 nt, synthetic construct
  source 1..22: mol_type = other RNA
ttggtaagctgtgagtccttcc

SEQ ID NO: 157675 - RNA, 22 nt, synthetic construct
  source 1..22: mol_type = other RNA
ttggtaatgggaaagacaggta

SEQ ID NO: 157676 - RNA, 22 nt, synthetic construct
  source 1..22: mol_type = other RNA
ttggtaatgttatatttccgta

SEQ ID NO: 157677 - RNA, 22 nt, synthetic construct
  source 1..22: mol_type = other RNA
ttggtagaggattccaggttta

SEQ ID NO: 157678 - RNA, 22 nt, synthetic construct
  source 1..22: mol_type = other RNA
ttggtagataccagacccttta

SEQ ID NO: 157679 - RNA, 22 nt, synthetic construct
  source 1..22: mol_type = other RNA
ttggtagatttctgcatagaga

SEQ ID NO: 157680 - RNA, 22 nt, synthetic construct
  source 1..22: mol_type = other RNA
ttggtaggccaaggcgggagga

SEQ ID NO: 157681 - RNA, 22 nt, synthetic construct
  source 1..22: mol_type = other RNA
ttggtagtcaatgcaatgcgtg

SEQ ID NO: 157682 - RNA, 22 nt, synthetic construct
  source 1..22: mol_type = other RNA
ttggtagtttgcacgtttttag

SEQ ID NO: 157683 - RNA, 22 nt, synthetic construct
  source 1..22: mol_type = other RNA
ttggtatgcatcttgaactaag

SEQ ID NO: 157684 - RNA, 22 nt, synthetic construct
  source 1..22: mol_type = other RNA
ttggtatgttgtgttttcattc

SEQ ID NO: 157685 - RNA, 22 nt, synthetic construct
  source 1..22: mol_type = other RNA
ttggtattcttatccctaccta

SEQ ID NO: 157686 - RNA, 22 nt, synthetic construct
  source 1..22: mol_type = other RNA
ttggtattttttagagacaggg

SEQ ID NO: 157687 - RNA, 22 nt, synthetic construct
  source 1..22: mol_type = other RNA
ttggtcaaaactgtattttcta

SEQ ID NO: 157688 - RNA, 22 nt, synthetic construct
  source 1..22: mol_type = other RNA
ttggtcaattgatctgccagga

SEQ ID NO: 157689 - RNA, 22 nt, synthetic construct
  source 1..22: mol_type = other RNA
ttggtcagaaaaatggaatatt

SEQ ID NO: 157690 - RNA, 22 nt, synthetic construct
  source 1..22: mol_type = other RNA
ttggtcctgcatatgtttttat

SEQ ID NO: 157691 - RNA, 22 nt, synthetic construct
  source 1..22: mol_type = other RNA
ttggtcctggaaaaagaccata

SEQ ID NO: 157692 - RNA, 22 nt, synthetic construct
  source 1..22: mol_type = other RNA
ttggtcgaaaacctgaaatggc

SEQ ID NO: 157693 - RNA, 22 nt, synthetic construct
  source 1..22: mol_type = other RNA
ttggtctcattcactagacaca

SEQ ID NO: 157694 - RNA, 22 nt, synthetic construct
  source 1..22: mol_type = other RNA
ttggtctgcagactcttgtccc

SEQ ID NO: 157695 - RNA, 22 nt, synthetic construct
  source 1..22: mol_type = other RNA
ttggtctgggtgatatctgtaa

SEQ ID NO: 157696 - RNA, 22 nt, synthetic construct
  source 1..22: mol_type = other RNA
ttggtcttaccctctagctccc

SEQ ID NO: 157697 - RNA, 22 nt, synthetic construct
  source 1..22: mol_type = other RNA
ttggtctttctcccaggtcagt

SEQ ID NO: 157698 - RNA, 22 nt, synthetic construct
  source 1..22: mol_type = other RNA
ttggtgaagagagcctgtggtc

SEQ ID NO: 157699 - RNA, 22 nt, synthetic construct
  source 1..22: mol_type = other RNA
ttggtgaaggttcatgaacata

SEQ ID NO: 157700 - RNA, 22 nt, synthetic construct
  source 1..22: mol_type = other RNA
ttggtgaatctgagtaaagggt

SEQ ID NO: 157701 - RNA, 22 nt, synthetic construct
  source 1..22: mol_type = other RNA
ttggtgactgaattcccacaaa

SEQ ID NO: 157702 - RNA, 22 nt, synthetic construct
  source 1..22: mol_type = other RNA
ttggtgagaacccagtgtctgc

SEQ ID NO: 157703 - RNA, 22 nt, synthetic construct
  source 1..22: mol_type = other RNA
ttggtgatcctaagccatctaa

SEQ ID NO: 157704 - RNA, 22 nt, synthetic construct
  source 1..22: mol_type = other RNA
ttggtgcaaggataaacaaaga

SEQ ID NO: 157705 - RNA, 22 nt, synthetic construct
  source 1..22: mol_type = other RNA
ttggtgcatttgggacagccta

SEQ ID NO: 157706 - RNA, 22 nt, synthetic construct
  source 1..22: mol_type = other RNA
ttggtgctgataaatggctttt

SEQ ID NO: 157707 - RNA, 22 nt, synthetic construct
  source 1..22: mol_type = other RNA
ttggtgcttagctgcctcttcc

SEQ ID NO: 157708 - RNA, 22 nt, synthetic construct
  source 1..22: mol_type = other RNA
ttggtgcttccttctcttatac

SEQ ID NO: 157709 - RNA, 22 nt, synthetic construct
  source 1..22: mol_type = other RNA
ttggtggcccacacctgcaatc

SEQ ID NO: 157710 - RNA, 22 nt, synthetic construct
  source 1..22: mol_type = other RNA
ttggtggtaactgatgtgagga

SEQ ID NO: 157711 - RNA, 22 nt, synthetic construct
  source 1..22: mol_type = other RNA
ttggtgtcatttttaagaaatc

SEQ ID NO: 157712 - RNA, 22 nt, synthetic construct
  source 1..22: mol_type = other RNA
ttggtgtgctcttttcatcact

SEQ ID NO: 157713 - RNA, 22 nt, synthetic construct
  source 1..22: mol_type = other RNA
ttggtgtgcttctgataggaat

SEQ ID NO: 157714 - RNA, 22 nt, synthetic construct
  source 1..22: mol_type = other RNA
ttggtgtgtgcaaaggattaga

SEQ ID NO: 157715 - RNA, 22 nt, synthetic construct
  source 1..22: mol_type = other RNA
ttggtgttgactgaattaatct

SEQ ID NO: 157716 - RNA, 22 nt, synthetic construct
  source 1..22: mol_type = other RNA
ttggtgtttctgacaggtggta

SEQ ID NO: 157717 - RNA, 22 nt, synthetic construct
  source 1..22: mol_type = other RNA
ttggtgtttttctaggtagttt

SEQ ID NO: 157718 - RNA, 22 nt, synthetic construct
  source 1..22: mol_type = other RNA
ttggttaaacttggtctgggtg

SEQ ID NO: 157719 - RNA, 22 nt, synthetic construct
  source 1..22: mol_type = other RNA
ttggttagtgttgtttttaaac

SEQ ID NO: 157720 - RNA, 22 nt, synthetic construct
  source 1..22: mol_type = other RNA
ttggttatgcgaatttactttt

SEQ ID NO: 157721 - RNA, 22 nt, synthetic construct
  source 1..22: mol_type = other RNA
ttggttattcatgtttgtggtt

SEQ ID NO: 157722 - RNA, 22 nt, synthetic construct
  source 1..22: mol_type = other RNA
ttggttcacttgaaacctgcca

SEQ ID NO: 157723 - RNA, 22 nt, synthetic construct
  source 1..22: mol_type = other RNA
ttggttcatttcaggaatgcaa

SEQ ID NO: 157724 - RNA, 22 nt, synthetic construct
  source 1..22: mol_type = other RNA
ttggttcgtttgaggcttttca

SEQ ID NO: 157725 - RNA, 22 nt, synthetic construct
  source 1..22: mol_type = other RNA
ttggttggaaaagaaagctgtg

SEQ ID NO: 157726 - RNA, 22 nt, synthetic construct
  source 1..22: mol_type = other RNA
ttggttggactccaccctgccc

SEQ ID NO: 157727 - RNA, 22 nt, synthetic construct
  source 1..22: mol_type = other RNA
ttggtttattttctgcatttgg

SEQ ID NO: 157728 - RNA, 22 nt, synthetic construct
  source 1..22: mol_type = other RNA
ttggtttcacacgcattgcatt

SEQ ID NO: 157729 - RNA, 22 nt, synthetic construct
  source 1..22: mol_type = other RNA
ttggtttcttcaagatactgca

SEQ ID NO: 157730 - RNA, 22 nt, synthetic construct
  source 1..22: mol_type = other RNA
ttggtttgaaatgatcttttgt

SEQ ID NO: 157731 - RNA, 22 nt, synthetic construct
  source 1..22: mol_type = other RNA
ttggtttgcaaaaattttgttc

SEQ ID NO: 157732 - RNA, 22 nt, synthetic construct
  source 1..22: mol_type = other RNA
ttggtttgtatgtgttaaacca

SEQ ID NO: 157733 - RNA, 22 nt, synthetic construct
  source 1..22: mol_type = other RNA
ttggtttgtgtgtttgtgaaaa

SEQ ID NO: 157734 - RNA, 22 nt, synthetic construct
  source 1..22: mol_type = other RNA
ttggttttactactgtactgtt

SEQ ID NO: 157735 - RNA, 22 nt, synthetic construct
  source 1..22: mol_type = other RNA
ttggttttgactcagtacttcc

SEQ ID NO: 157736 - RNA, 22 nt, synthetic construct
  source 1..22: mol_type = other RNA
ttggtttttatggaataatgga

SEQ ID NO: 157737 - RNA, 22 nt, synthetic construct
  source 1..22: mol_type = other RNA
ttgtaaaccatatggttaatag

SEQ ID NO: 157738 - RNA, 22 nt, synthetic construct
  source 1..22: mol_type = other RNA
ttgtaaatgaaacacttgtgta

SEQ ID NO: 157739 - RNA, 22 nt, synthetic construct
  source 1..22: mol_type = other RNA
ttgtaacatgttagattaggaa

SEQ ID NO: 157740 - RNA, 22 nt, synthetic construct
  source 1..22: mol_type = other RNA
ttgtaacgtgtatagctttttt

SEQ ID NO: 157741 - RNA, 22 nt, synthetic construct
  source 1..22: mol_type = other RNA
ttgtaactacagacatgccaca

SEQ ID NO: 157742 - RNA, 22 nt, synthetic construct
  source 1..22: mol_type = other RNA
ttgtaacttgaattcagatggc

SEQ ID NO: 157743 - RNA, 22 nt, synthetic construct
  source 1..22: mol_type = other RNA
ttgtaacttgttcatgtttaca

SEQ ID NO: 157744 - RNA, 22 nt, synthetic construct
  source 1..22: mol_type = other RNA
ttgtaagttggattcccaggta

SEQ ID NO: 157745 - RNA, 22 nt, synthetic construct
  source 1..22: mol_type = other RNA
ttgtaataacttggagaactta

SEQ ID NO: 157746 - RNA, 22 nt, synthetic construct
  source 1..22: mol_type = other RNA
ttgtaatatacttgtcaagttc

SEQ ID NO: 157747 - RNA, 22 nt, synthetic construct
  source 1..22: mol_type = other RNA
ttgtaatcaagtatctccctgt

SEQ ID NO: 157748 - RNA, 22 nt, synthetic construct
  source 1..22: mol_type = other RNA
ttgtaatcacagtacgctttta

SEQ ID NO: 157749 - RNA, 22 nt, synthetic construct
  source 1..22: mol_type = other RNA
ttgtaatcctgtttctctacat

SEQ ID NO: 157750 - RNA, 22 nt, synthetic construct
  source 1..22: mol_type = other RNA
ttgtaatctaaggattatggct

SEQ ID NO: 157751 - RNA, 22 nt, synthetic construct
  source 1..22: mol_type = other RNA
ttgtaatgtctcctctttcata

SEQ ID NO: 157752 - RNA, 22 nt, synthetic construct
  source 1..22: mol_type = other RNA
ttgtaatgttacttctcagcta

SEQ ID NO: 157753 - RNA, 22 nt, synthetic construct
  source 1..22: mol_type = other RNA
ttgtaattcatcctactagtat

SEQ ID NO: 157754 - RNA, 22 nt, synthetic construct
  source 1..22: mol_type = other RNA
ttgtacaattttcttacccttt

SEQ ID NO: 157755 - RNA, 22 nt, synthetic construct
  source 1..22: mol_type = other RNA
ttgtacacctcaaactagaaaa

SEQ ID NO: 157756 - RNA, 22 nt, synthetic construct
  source 1..22: mol_type = other RNA
ttgtacagtaattgtagtttcc

SEQ ID NO: 157757 - RNA, 22 nt, synthetic construct
  source 1..22: mol_type = other RNA
ttgtacatgaagtcctcaatca

SEQ ID NO: 157758 - RNA, 22 nt, synthetic construct
  source 1..22: mol_type = other RNA
ttgtacatttaaaattgcagag

SEQ ID NO: 157759 - RNA, 22 nt, synthetic construct
  source 1..22: mol_type = other RNA
ttgtaccttgatttatggccta

SEQ ID NO: 157760 - RNA, 22 nt, synthetic construct
  source 1..22: mol_type = other RNA
ttgtaccttggagagaaacctt

SEQ ID NO: 157761 - RNA, 22 nt, synthetic construct
  source 1..22: mol_type = other RNA
ttgtactacttgtcaggtgggc

SEQ ID NO: 157762 - RNA, 22 nt, synthetic construct
  source 1..22: mol_type = other RNA
ttgtactcccagcctcaaacaa

SEQ ID NO: 157763 - RNA, 22 nt, synthetic construct
  source 1..22: mol_type = other RNA
ttgtactgtgtggcttctcaaa

SEQ ID NO: 157764 - RNA, 22 nt, synthetic construct
  source 1..22: mol_type = other RNA
ttgtacttctaccttgaaaatg

SEQ ID NO: 157765 - RNA, 22 nt, synthetic construct
  source 1..22: mol_type = other RNA
ttgtacttgacacaaaggactg

SEQ ID NO: 157766 - RNA, 22 nt, synthetic construct
  source 1..22: mol_type = other RNA
ttgtagaccctgttagtcccct

SEQ ID NO: 157767 - RNA, 22 nt, synthetic construct
  source 1..22: mol_type = other RNA
ttgtagagacagaatcttactg

SEQ ID NO: 157768 - RNA, 22 nt, synthetic construct
  source 1..22: mol_type = other RNA
ttgtagagcaagcaacaccaga

SEQ ID NO: 157769 - RNA, 22 nt, synthetic construct
  source 1..22: mol_type = other RNA
ttgtagaggaggagggttagat

SEQ ID NO: 157770 - RNA, 22 nt, synthetic construct
  source 1..22: mol_type = other RNA
ttgtagagggaatttgttttac

SEQ ID NO: 157771 - RNA, 22 nt, synthetic construct
  source 1..22: mol_type = other RNA
ttgtagatattttctgtcattc

SEQ ID NO: 157772 - RNA, 22 nt, synthetic construct
  source 1..22: mol_type = other RNA
ttgtagctaatatctttgggga

SEQ ID NO: 157773 - RNA, 22 nt, synthetic construct
  source 1..22: mol_type = other RNA
ttgtagctatatcccaaattgg

SEQ ID NO: 157774 - RNA, 22 nt, synthetic construct
  source 1..22: mol_type = other RNA
ttgtagctcaaagcatatgaat

SEQ ID NO: 157775 - RNA, 22 nt, synthetic construct
  source 1..22: mol_type = other RNA
ttgtaggaaagcctgtgacagt

SEQ ID NO: 157776 - RNA, 22 nt, synthetic construct
  source 1..22: mol_type = other RNA
ttgtaggtgtctcatttaataa

SEQ ID NO: 157777 - RNA, 22 nt, synthetic construct
  source 1..22: mol_type = other RNA
ttgtagtgagccaaaatcgtgc

SEQ ID NO: 157778 - RNA, 22 nt, synthetic construct
  source 1..22: mol_type = other RNA
ttgtagtgtcttaatcctattt

SEQ ID NO: 157779 - RNA, 22 nt, synthetic construct
  source 1..22: mol_type = other RNA
ttgtagtttccatggaggggcc

SEQ ID NO: 157780 - RNA, 22 nt, synthetic construct
  source 1..22: mol_type = other RNA
ttgtataaattactgtctgtga

SEQ ID NO: 157781 - RNA, 22 nt, synthetic construct
  source 1..22: mol_type = other RNA
ttgtatatacccttctgttaat

SEQ ID NO: 157782 - RNA, 22 nt, synthetic construct
  source 1..22: mol_type = other RNA
ttgtatatggtttaaggtaagg

SEQ ID NO: 157783 - RNA, 22 nt, synthetic construct
  source 1..22: mol_type = other RNA
ttgtatccagtaatcttgctaa

SEQ ID NO: 157784 - RNA, 22 nt, synthetic construct
  source 1..22: mol_type = other RNA
ttgtatcctgagacttaggcaa

SEQ ID NO: 157785 - RNA, 22 nt, synthetic construct
  source 1..22: mol_type = other RNA
ttgtatcctgtttgagaagtct

SEQ ID NO: 157786 - RNA, 22 nt, synthetic construct
  source 1..22: mol_type = other RNA
ttgtatctgtgatccctgatat

SEQ ID NO: 157787 - RNA, 22 nt, synthetic construct
  source 1..22: mol_type = other RNA
ttgtatcttcacaaacaaatcc

SEQ ID NO: 157788 - RNA, 22 nt, synthetic construct
  source 1..22: mol_type = other RNA
ttgtatggagactagtacactg

SEQ ID NO: 157789 - RNA, 22 nt, synthetic construct
  source 1..22: mol_type = other RNA
ttgtatgtgttaaaccattctt

SEQ ID NO: 157790 - RNA, 22 nt, synthetic construct
  source 1..22: mol_type = other RNA
ttgtattatttctgtcatctga

SEQ ID NO: 157791 - RNA, 22 nt, synthetic construct
  source 1..22: mol_type = other RNA
ttgtattcatccagtttaaagc

SEQ ID NO: 157792 - RNA, 22 nt, synthetic construct
  source 1..22: mol_type = other RNA
ttgtattctgacctaaagtttt

SEQ ID NO: 157793 - RNA, 22 nt, synthetic construct
  source 1..22: mol_type = other RNA
ttgtatttctgttagatggtgc

SEQ ID NO: 157794 - RNA, 22 nt, synthetic construct
  source 1..22: mol_type = other RNA
ttgtattttacaccatgcaggt

SEQ ID NO: 157795 - RNA, 22 nt, synthetic construct
  source 1..22: mol_type = other RNA
ttgtatttttcacaaacacaca

SEQ ID NO: 157796 - RNA, 22 nt, synthetic construct
  source 1..22: mol_type = other RNA
ttgtcaacttttagtaggtctc

SEQ ID NO: 157797 - RNA, 22 nt, synthetic construct
  source 1..22: mol_type = other RNA
ttgtcaagctatcagaatttta

SEQ ID NO: 157798 - RNA, 22 nt, synthetic construct
  source 1..22: mol_type = other RNA
ttgtcaaggtcatcctttccct

SEQ ID NO: 157799 - RNA, 22 nt, synthetic construct
  source 1..22: mol_type = other RNA
ttgtcaagtgactccaagcaca

SEQ ID NO: 157800 - RNA, 22 nt, synthetic construct
  source 1..22: mol_type = other RNA
ttgtcaagttctgatttcaaag

SEQ ID NO: 157801 - RNA, 22 nt, synthetic construct
  source 1..22: mol_type = other RNA
ttgtcaataatttggatgaacg

SEQ ID NO: 157802 - RNA, 22 nt, synthetic construct
  source 1..22: mol_type = other RNA
ttgtcaatggggaactttattt

SEQ ID NO: 157803 - RNA, 22 nt, synthetic construct
  source 1..22: mol_type = other RNA
ttgtcacaaaatgtggatgcat

SEQ ID NO: 157804 - RNA, 22 nt, synthetic construct
  source 1..22: mol_type = other RNA
ttgtcacacggaaaacattatt

SEQ ID NO: 157805 - RNA, 22 nt, synthetic construct
  source 1..22: mol_type = other RNA
ttgtcacatagaagcgctcttc

SEQ ID NO: 157806 - RNA, 22 nt, synthetic construct
  source 1..22: mol_type = other RNA
ttgtcagaaaagatcagtaaaa

SEQ ID NO: 157807 - RNA, 22 nt, synthetic construct
  source 1..22: mol_type = other RNA
ttgtcagaattagaaagctgga

SEQ ID NO: 157808 - RNA, 22 nt, synthetic construct
  source 1..22: mol_type = other RNA
ttgtcaggcatgctaactgcag

SEQ ID NO: 157809 - RNA, 22 nt, synthetic construct
  source 1..22: mol_type = other RNA
ttgtcaggtgggcactgggagc

SEQ ID NO: 157810 - RNA, 22 nt, synthetic construct
  source 1..22: mol_type = other RNA
ttgtcagtaattctgcagtgaa

SEQ ID NO: 157811 - RNA, 22 nt, synthetic construct
  source 1..22: mol_type = other RNA
ttgtcataacagtattgtcttc

SEQ ID NO: 157812 - RNA, 22 nt, synthetic construct
  source 1..22: mol_type = other RNA
ttgtcatgaatgaatgttgagt

SEQ ID NO: 157813 - RNA, 22 nt, synthetic construct
  source 1..22: mol_type = other RNA
ttgtcattaccttatagatgac

SEQ ID NO: 157814 - RNA, 22 nt, synthetic construct
  source 1..22: mol_type = other RNA
ttgtcatttctgcttagtcttc

SEQ ID NO: 157815 - RNA, 22 nt, synthetic construct
  source 1..22: mol_type = other RNA
ttgtccaccagacaaaaataga

SEQ ID NO: 157816 - RNA, 22 nt, synthetic construct
  source 1..22: mol_type = other RNA
ttgtccactgtcagtgggactg

SEQ ID NO: 157817 - RNA, 22 nt, synthetic construct
  source 1..22: mol_type = other RNA
ttgtccatctggattatagtgg

SEQ ID NO: 157818 - RNA, 22 nt, synthetic construct
  source 1..22: mol_type = other RNA
ttgtcccatggtcaaatcaata

SEQ ID NO: 157819 - RNA, 22 nt, synthetic construct
  source 1..22: mol_type = other RNA
ttgtcccggcatgcctctccca

SEQ ID NO: 157820 - RNA, 22 nt, synthetic construct
  source 1..22: mol_type = other RNA
ttgtcctaaaattccttccttt

SEQ ID NO: 157821 - RNA, 22 nt, synthetic construct
  source 1..22: mol_type = other RNA
ttgtcctggcagatcaattgac

SEQ ID NO: 157822 - RNA, 22 nt, synthetic construct
  source 1..22: mol_type = other RNA
ttgtccttcattctgttaatgt

SEQ ID NO: 157823 - RNA, 22 nt, synthetic construct
  source 1..22: mol_type = other RNA
ttgtcgttgagtacctctggga

SEQ ID NO: 157824 - RNA, 22 nt, synthetic construct
  source 1..22: mol_type = other RNA
ttgtctattccctacattgcct

SEQ ID NO: 157825 - RNA, 22 nt, synthetic construct
  source 1..22: mol_type = other RNA
ttgtctcaacctttgcctcctg

SEQ ID NO: 157826 - RNA, 22 nt, synthetic construct
  source 1..22: mol_type = other RNA
ttgtctcccgggttcaagcgat

SEQ ID NO: 157827 - RNA, 22 nt, synthetic construct
  source 1..22: mol_type = other RNA
ttgtctcggatttaagagagga

SEQ ID NO: 157828 - RNA, 22 nt, synthetic construct
  source 1..22: mol_type = other RNA
ttgtctctggaaggctaagcat

SEQ ID NO: 157829 - RNA, 22 nt, synthetic construct
  source 1..22: mol_type = other RNA
ttgtctgattcagtttgctagt

SEQ ID NO: 157830 - RNA, 22 nt, synthetic construct
  source 1..22: mol_type = other RNA
ttgtctgcaagcagatctgctg

SEQ ID NO: 157831 - RNA, 22 nt, synthetic construct
  source 1..22: mol_type = other RNA
ttgtctggaacacacattagcc

SEQ ID NO: 157832 - RNA, 22 nt, synthetic construct
  source 1..22: mol_type = other RNA
ttgtctggtggacaaaaaacgc

SEQ ID NO: 157833 - RNA, 22 nt, synthetic construct
  source 1..22: mol_type = other RNA
ttgtcttacataggcttagtac

SEQ ID NO: 157834 - RNA, 22 nt, synthetic construct
  source 1..22: mol_type = other RNA
ttgtcttctaaccctcaaatgc

SEQ ID NO: 157835 - RNA, 22 nt, synthetic construct
  source 1..22: mol_type = other RNA
ttgtcttgaatagcatcttagc

SEQ ID NO: 157836 - RNA, 22 nt, synthetic construct
  source 1..22: mol_type = other RNA
ttgtctttgtctattccctaca

SEQ ID NO: 157837 - RNA, 22 nt, synthetic construct
  source 1..22: mol_type = other RNA
ttgtcttttctatctgaacatt

SEQ ID NO: 157838 - RNA, 22 nt, synthetic construct
  source 1..22: mol_type = other RNA
ttgtctttttgtgacttgttta

SEQ ID NO: 157839 - RNA, 22 nt, synthetic construct
  source 1..22: mol_type = other RNA
ttgtgaaccttgaagtacttca

SEQ ID NO: 157840 - RNA, 22 nt, synthetic construct
  source 1..22: mol_type = other RNA
ttgtgaagggaggtaggcttag

SEQ ID NO: 157841 - RNA, 22 nt, synthetic construct
  source 1..22: mol_type = other RNA
ttgtgacaagttcagcatcttc

SEQ ID NO: 157842 - RNA, 22 nt, synthetic construct
  source 1..22: mol_type = other RNA
ttgtgacagttctatttctttc

SEQ ID NO: 157843 - RNA, 22 nt, synthetic construct
  source 1..22: mol_type = other RNA
ttgtgacatcaagggtggtgct

SEQ ID NO: 157844 - RNA, 22 nt, synthetic construct
  source 1..22: mol_type = other RNA
ttgtgaccagatcaaacgtgct

SEQ ID NO: 157845 - RNA, 22 nt, synthetic construct
  source 1..22: mol_type = other RNA
ttgtgactgtgagggtaagaaa

SEQ ID NO: 157846 - RNA, 22 nt, synthetic construct
  source 1..22: mol_type = other RNA
ttgtgaggattcgattaaaata

SEQ ID NO: 157847 - RNA, 22 nt, synthetic construct
  source 1..22: mol_type = other RNA
ttgtgagttttaactcttgcat

SEQ ID NO: 157848 - RNA, 22 nt, synthetic construct
  source 1..22: mol_type = other RNA
ttgtgatctatgcatactgcag

SEQ ID NO: 157849 - RNA, 22 nt, synthetic construct
  source 1..22: mol_type = other RNA
ttgtgatgtctcagatgtctcc

SEQ ID NO: 157850 - RNA, 22 nt, synthetic construct
  source 1..22: mol_type = other RNA
ttgtgcaacataaatagggtgc

SEQ ID NO: 157851 - RNA, 22 nt, synthetic construct
  source 1..22: mol_type = other RNA
ttgtgcaaccatccccgctgtc

SEQ ID NO: 157852 - RNA, 22 nt, synthetic construct
  source 1..22: mol_type = other RNA
ttgtgcacacatccacgcgtaa

SEQ ID NO: 157853 - RNA, 22 nt, synthetic construct
  source 1..22: mol_type = other RNA
ttgtgcacatgttccctagaac

SEQ ID NO: 157854 - RNA, 22 nt, synthetic construct
  source 1..22: mol_type = other RNA
ttgtgcacctcgggttcaagcc

SEQ ID NO: 157855 - RNA, 22 nt, synthetic construct
  source 1..22: mol_type = other RNA
ttgtgcacttaaaatttagatc

SEQ ID NO: 157856 - RNA, 22 nt, synthetic construct
  source 1..22: mol_type = other RNA
ttgtgcatactgtgatgatttt

SEQ ID NO: 157857 - RNA, 22 nt, synthetic construct
  source 1..22: mol_type = other RNA
ttgtgcatatataccacatttt

SEQ ID NO: 157858 - RNA, 22 nt, synthetic construct
  source 1..22: mol_type = other RNA
ttgtgcatcaaaggacactatt

SEQ ID NO: 157859 - RNA, 22 nt, synthetic construct
  source 1..22: mol_type = other RNA
ttgtgcatcagaattccattcc

SEQ ID NO: 157860 - RNA, 22 nt, synthetic construct
  source 1..22: mol_type = other RNA
ttgtgcatcctttatacctttt

SEQ ID NO: 157861 - RNA, 22 nt, synthetic construct
  source 1..22: mol_type = other RNA
ttgtgcatgtgcaggaaacttc

SEQ ID NO: 157862 - RNA, 22 nt, synthetic construct
  source 1..22: mol_type = other RNA
ttgtgccagtgaactccagtct

SEQ ID NO: 157863 - RNA, 22 nt, synthetic construct
  source 1..22: mol_type = other RNA
ttgtgctacctcaaattgtgtg

SEQ ID NO: 157864 - RNA, 22 nt, synthetic construct
  source 1..22: mol_type = other RNA
ttgtgctcagtggttctgcgtg

SEQ ID NO: 157865 - RNA, 22 nt, synthetic construct
  source 1..22: mol_type = other RNA
ttgtgctgaaaccccgcatact

SEQ ID NO: 157866 - RNA, 22 nt, synthetic construct
  source 1..22: mol_type = other RNA
ttgtgcttcgaggtcgcaccct

SEQ ID NO: 157867 - RNA, 22 nt, synthetic construct
  source 1..22: mol_type = other RNA
ttgtgcttggatattctacaga

SEQ ID NO: 157868 - RNA, 22 nt, synthetic construct
  source 1..22: mol_type = other RNA
ttgtgcttttaatactttcaca

SEQ ID NO: 157869 - RNA, 22 nt, synthetic construct
  source 1..22: mol_type = other RNA
ttgtggaattaactccagggga

SEQ ID NO: 157870 - RNA, 22 nt, synthetic construct
  source 1..22: mol_type = other RNA
ttgtggagatggggacttgctc

SEQ ID NO: 157871 - RNA, 22 nt, synthetic construct
  source 1..22: mol_type = other RNA
ttgtggagtggaggggcaggaa

SEQ ID NO: 157872 - RNA, 22 nt, synthetic construct
  source 1..22: mol_type = other RNA
ttgtggatgagattaatgtagg

SEQ ID NO: 157873 - RNA, 22 nt, synthetic construct
  source 1..22: mol_type = other RNA
ttgtggatgtccttaatgccac

SEQ ID NO: 157874 - RNA, 22 nt, synthetic construct
  source 1..22: mol_type = other RNA
ttgtggcatctttgttacagca

SEQ ID NO: 157875 - RNA, 22 nt, synthetic construct
  source 1..22: mol_type = other RNA
ttgtggcctcttcccttgtgca

SEQ ID NO: 157876 - RNA, 22 nt, synthetic construct
  source 1..22: mol_type = other RNA
ttgtggctacaccctgggaaag

SEQ ID NO: 157877 - RNA, 22 nt, synthetic construct
  source 1..22: mol_type = other RNA
ttgtggctgacatgtgtaaaac

SEQ ID NO: 157878 - RNA, 22 nt, synthetic construct
  source 1..22: mol_type = other RNA
ttgtgggaattcagtcaccaaa

SEQ ID NO: 157879 - RNA, 22 nt, synthetic construct
  source 1..22: mol_type = other RNA
ttgtgggtattttgttgttgtt

SEQ ID NO: 157880 - RNA, 22 nt, synthetic construct
  source 1..22: mol_type = other RNA
ttgtggtcttaagagactctca

SEQ ID NO: 157881 - RNA, 22 nt, synthetic construct
  source 1..22: mol_type = other RNA
ttgtggttttaacctcttgaag

SEQ ID NO: 157882 - RNA, 22 nt, synthetic construct
  source 1..22: mol_type = other RNA
ttgtgtaactaccactgaggtc

SEQ ID NO: 157883 - RNA, 22 nt, synthetic construct
  source 1..22: mol_type = other RNA
ttgtgtagaaatgtggagataa

SEQ ID NO: 157884 - RNA, 22 nt, synthetic construct
  source 1..22: mol_type = other RNA
ttgtgtagaggtgaagttaagg

SEQ ID NO: 157885 - RNA, 22 nt, synthetic construct
  source 1..22: mol_type = other RNA
ttgtgtagcgggaaaaaataat

SEQ ID NO: 157886 - RNA, 22 nt, synthetic construct
  source 1..22: mol_type = other RNA
ttgtgtatatggtaaaatgtac

SEQ ID NO: 157887 - RNA, 22 nt, synthetic construct
  source 1..22: mol_type = other RNA
ttgtgtcaagtacaactaataa

SEQ ID NO: 157888 - RNA, 22 nt, synthetic construct
  source 1..22: mol_type = other RNA
ttgtgtcatttttgtattctga

SEQ ID NO: 157889 - RNA, 22 nt, synthetic construct
  source 1..22: mol_type = other RNA
ttgtgtcttctgtttttcttag

SEQ ID NO: 157890 - RNA, 22 nt, synthetic construct
  source 1..22: mol_type = other RNA
ttgtgtgcacctaataaaatgt

SEQ ID NO: 157891 - RNA, 22 nt, synthetic construct
  source 1..22: mol_type = other RNA
ttgtgtggacacactgaaacaa

SEQ ID NO: 157892 - RNA, 22 nt, synthetic construct
  source 1..22: mol_type = other RNA
ttgtgtgtcgagaaaaatgggg

SEQ ID NO: 157893 - RNA, 22 nt, synthetic construct
  source 1..22: mol_type = other RNA
ttgtgtgttctctttttgacag

SEQ ID NO: 157894 - RNA, 22 nt, synthetic construct
  source 1..22: mol_type = other RNA
ttgtgtgtttgtgaaaaataca

SEQ ID NO: 157895 - RNA, 22 nt, synthetic construct
  source 1..22: mol_type = other RNA
ttgtgttgcccacgctggtctc

SEQ ID NO: 157896 - RNA, 22 nt, synthetic construct
  source 1..22: mol_type = other RNA
ttgtgttggtgtttctgacagg

SEQ ID NO: 157897 - RNA, 22 nt, synthetic construct
  source 1..22: mol_type = other RNA
ttgtgtttgtgaccagatcaaa

SEQ ID NO: 157898 - RNA, 22 nt, synthetic construct
  source 1..22: mol_type = other RNA
ttgtgttttatttggctgttac

SEQ ID NO: 157899 - RNA, 22 nt, synthetic construct
  source 1..22: mol_type = other RNA
ttgtgttttcactctcaatagt

SEQ ID NO: 157900 - RNA, 22 nt, synthetic construct
  source 1..22: mol_type = other RNA
ttgtgttttcattcgttcaaaa

SEQ ID NO: 157901 - RNA, 22 nt, synthetic construct
  source 1..22: mol_type = other RNA
ttgttaacatttcttctagtca

SEQ ID NO: 157902 - RNA, 22 nt, synthetic construct
  source 1..22: mol_type = other RNA
ttgttaactgtagagaaaatgt

SEQ ID NO: 157903 - RNA, 22 nt, synthetic construct
  source 1..22: mol_type = other RNA
ttgttaagcattttccggttgt

SEQ ID NO: 157904 - RNA, 22 nt, synthetic construct
  source 1..22: mol_type = other RNA
ttgttacacaggtagacatgtg

SEQ ID NO: 157905 - RNA, 22 nt, synthetic construct
  source 1..22: mol_type = other RNA
ttgttacagcagctctagcaaa

SEQ ID NO: 157906 - RNA, 22 nt, synthetic construct
  source 1..22: mol_type = other RNA
ttgttactgatctgctcaagtt

SEQ ID NO: 157907 - RNA, 22 nt, synthetic construct
  source 1..22: mol_type = other RNA
ttgttagaattttgcttttgct

SEQ ID NO: 157908 - RNA, 22 nt, synthetic construct
  source 1..22: mol_type = other RNA
ttgttagatctgggataatgct

SEQ ID NO: 157909 - RNA, 22 nt, synthetic construct
  source 1..22: mol_type = other RNA
ttgttagccacagcgttgttca

SEQ ID NO: 157910 - RNA, 22 nt, synthetic construct
  source 1..22: mol_type = other RNA
ttgttaggtgctggcttcaata

SEQ ID NO: 157911 - RNA, 22 nt, synthetic construct
  source 1..22: mol_type = other RNA
ttgttagtaggaaaaccatgtc

SEQ ID NO: 157912 - RNA, 22 nt, synthetic construct
  source 1..22: mol_type = other RNA
ttgttagtgccttcagaaggag

SEQ ID NO: 157913 - RNA, 22 nt, synthetic construct
  source 1..22: mol_type = other RNA
ttgttataagcaaagatatggg

SEQ ID NO: 157914 - RNA, 22 nt, synthetic construct
  source 1..22: mol_type = other RNA
ttgttatatccagattgatatc

SEQ ID NO: 157915 - RNA, 22 nt, synthetic construct
  source 1..22: mol_type = other RNA
ttgttatctgaacgtctttaaa

SEQ ID NO: 157916 - RNA, 22 nt, synthetic construct
  source 1..22: mol_type = other RNA
ttgttatggtaggtgctttttg

SEQ ID NO: 157917 - RNA, 22 nt, synthetic construct
  source 1..22: mol_type = other RNA
ttgttattagggtaatgctggc

SEQ ID NO: 157918 - RNA, 22 nt, synthetic construct
  source 1..22: mol_type = other RNA
ttgttcaagcgctgaagtactt

SEQ ID NO: 157919 - RNA, 22 nt, synthetic construct
  source 1..22: mol_type = other RNA
ttgttcagaaatagactcccaa

SEQ ID NO: 157920 - RNA, 22 nt, synthetic construct
  source 1..22: mol_type = other RNA
ttgttcaggagttttgcctctt

SEQ ID NO: 157921 - RNA, 22 nt, synthetic construct
  source 1..22: mol_type = other RNA
ttgttcagggaaggctgcaagc

SEQ ID NO: 157922 - RNA, 22 nt, synthetic construct
  source 1..22: mol_type = other RNA
ttgttcagttgaaaagtatggt

SEQ ID NO: 157923 - RNA, 22 nt, synthetic construct
  source 1..22: mol_type = other RNA
ttgttcatcatcttttgcctgg

SEQ ID NO: 157924 - RNA, 22 nt, synthetic construct
  source 1..22: mol_type = other RNA
ttgttcatgaaatcccctttag

SEQ ID NO: 157925 - RNA, 22 nt, synthetic construct
  source 1..22: mol_type = other RNA
ttgttcatgtctgtgtagttca

SEQ ID NO: 157926 - RNA, 22 nt, synthetic construct
  source 1..22: mol_type = other RNA
ttgttcattcatctgttaatgg

SEQ ID NO: 157927 - RNA, 22 nt, synthetic construct
  source 1..22: mol_type = other RNA
ttgttccaggggggaaaaaacc

SEQ ID NO: 157928 - RNA, 22 nt, synthetic construct
  source 1..22: mol_type = other RNA
ttgttctaatttgtgaaccttg

SEQ ID NO: 157929 - RNA, 22 nt, synthetic construct
  source 1..22: mol_type = other RNA
ttgttctcgttcatgttcaagg

SEQ ID NO: 157930 - RNA, 22 nt, synthetic construct
  source 1..22: mol_type = other RNA
ttgttctctttgtttatccttg

SEQ ID NO: 157931 - RNA, 22 nt, synthetic construct
  source 1..22: mol_type = other RNA
ttgttctgctgttgatggacgt

SEQ ID NO: 157932 - RNA, 22 nt, synthetic construct
  source 1..22: mol_type = other RNA
ttgttctgtcacatttgaaaga

SEQ ID NO: 157933 - RNA, 22 nt, synthetic construct
  source 1..22: mol_type = other RNA
ttgttctgtcacggtgccctac

SEQ ID NO: 157934 - RNA, 22 nt, synthetic construct
  source 1..22: mol_type = other RNA
ttgttcttggttaatattacag

SEQ ID NO: 157935 - RNA, 22 nt, synthetic construct
  source 1..22: mol_type = other RNA
ttgttcttttcaaaaacagcat

SEQ ID NO: 157936 - RNA, 22 nt, synthetic construct
  source 1..22: mol_type = other RNA
ttgttgaaaacgaggaaaagag

SEQ ID NO: 157937 - RNA, 22 nt, synthetic construct
  source 1..22: mol_type = other RNA
ttgttgaatcttaacatttctc

SEQ ID NO: 157938 - RNA, 22 nt, synthetic construct
  source 1..22: mol_type = other RNA
ttgttgaatgtggcagaattta

SEQ ID NO: 157939 - RNA, 22 nt, synthetic construct
  source 1..22: mol_type = other RNA
ttgttgaattgttggagttctt

SEQ ID NO: 157940 - RNA, 22 nt, synthetic construct
  source 1..22: mol_type = other RNA
ttgttgacatcctttgcgtctg

SEQ ID NO: 157941 - RNA, 22 nt, synthetic construct
  source 1..22: mol_type = other RNA
ttgttgacccaatcatgttctt

SEQ ID NO: 157942 - RNA, 22 nt, synthetic construct
  source 1..22: mol_type = other RNA
ttgttgaggatgactgtcctga

SEQ ID NO: 157943 - RNA, 22 nt, synthetic construct
  source 1..22: mol_type = other RNA
ttgttgcatccccattcaattg

SEQ ID NO: 157944 - RNA, 22 nt, synthetic construct
  source 1..22: mol_type = other RNA
ttgttgccaggtggacgcggcc

SEQ ID NO: 157945 - RNA, 22 nt, synthetic construct
  source 1..22: mol_type = other RNA
ttgttgccatcattttatgaaa

SEQ ID NO: 157946 - RNA, 22 nt, synthetic construct
  source 1..22: mol_type = other RNA
ttgttgcctgtagttttggtgt

SEQ ID NO: 157947 - RNA, 22 nt, synthetic construct
  source 1..22: mol_type = other RNA
ttgttgcgcgtcaaaagatgct

SEQ ID NO: 157948 - RNA, 22 nt, synthetic construct
  source 1..22: mol_type = other RNA
ttgttgctattgttgaattgtt

SEQ ID NO: 157949 - RNA, 22 nt, synthetic construct
  source 1..22: mol_type = other RNA
ttgttggacagctgggagaaag

SEQ ID NO: 157950 - RNA, 22 nt, synthetic construct
  source 1..22: mol_type = other RNA
ttgttggctaaaagaccgcaag

SEQ ID NO: 157951 - RNA, 22 nt, synthetic construct
  source 1..22: mol_type = other RNA
ttgttgggtttaactgaggtgt

SEQ ID NO: 157952 - RNA, 22 nt, synthetic construct
  source 1..22: mol_type = other RNA
ttgttggtttgtgtgtttgtga

SEQ ID NO: 157953 - RNA, 22 nt, synthetic construct
  source 1..22: mol_type = other RNA
ttgttgttggtttgtgtgtttg

SEQ ID NO: 157954 - RNA, 22 nt, synthetic construct
  source 1..22: mol_type = other RNA
ttgttgttgttgtttctgagcc

SEQ ID NO: 157955 - RNA, 22 nt, synthetic construct
  source 1..22: mol_type = other RNA
ttgttgttgtttctgagccaga

SEQ ID NO: 157956 - RNA, 22 nt, synthetic construct
  source 1..22: mol_type = other RNA
ttgttgtttctgagccagagtt

SEQ ID NO: 157957 - RNA, 22 nt, synthetic construct
  source 1..22: mol_type = other RNA
ttgtttaaaaacaacactaacc

SEQ ID NO: 157958 - RNA, 22 nt, synthetic construct
  source 1..22: mol_type = other RNA
ttgtttaattagccgggtgtag

SEQ ID NO: 157959 - RNA, 22 nt, synthetic construct
  source 1..22: mol_type = other RNA
ttgtttaattctgtttaccctt

SEQ ID NO: 157960 - RNA, 22 nt, synthetic construct
  source 1..22: mol_type = other RNA
ttgtttacagtagccaaaggta

SEQ ID NO: 157961 - RNA, 22 nt, synthetic construct
  source 1..22: mol_type = other RNA
ttgtttacccagtgtgtttgtt

SEQ ID NO: 157962 - RNA, 22 nt, synthetic construct
  source 1..22: mol_type = other RNA
ttgtttacttgggtataaatga

SEQ ID NO: 157963 - RNA, 22 nt, synthetic construct
  source 1..22: mol_type = other RNA
ttgtttagtagctgtctttaat

SEQ ID NO: 157964 - RNA, 22 nt, synthetic construct
  source 1..22: mol_type = other RNA
ttgtttatccttgcaccaactc

SEQ ID NO: 157965 - RNA, 22 nt, synthetic construct
  source 1..22: mol_type = other RNA
ttgtttatttgctgtcaggcaa

SEQ ID NO: 157966 - RNA, 22 nt, synthetic construct
  source 1..22: mol_type = other RNA
ttgtttcacttttctggttttc

SEQ ID NO: 157967 - RNA, 22 nt, synthetic construct
  source 1..22: mol_type = other RNA
ttgtttcagtgtgtccacacaa

SEQ ID NO: 157968 - RNA, 22 nt, synthetic construct
  source 1..22: mol_type = other RNA
ttgtttccactttgaggttatt

SEQ ID NO: 157969 - RNA, 22 nt, synthetic construct
  source 1..22: mol_type = other RNA
ttgtttccatgtcttggctatt

SEQ ID NO: 157970 - RNA, 22 nt, synthetic construct
  source 1..22: mol_type = other RNA
ttgtttctgagccagagtttca

SEQ ID NO: 157971 - RNA, 22 nt, synthetic construct
  source 1..22: mol_type = other RNA
ttgtttctgaggtggagttctg

SEQ ID NO: 157972 - RNA, 22 nt, synthetic construct
  source 1..22: mol_type = other RNA
ttgtttgaattaagcaccacta

SEQ ID NO: 157973 - RNA, 22 nt, synthetic construct
  source 1..22: mol_type = other RNA
ttgtttgaggctgggagtacaa

SEQ ID NO: 157974 - RNA, 22 nt, synthetic construct
  source 1..22: mol_type = other RNA
ttgtttgctagagctgctgtaa

SEQ ID NO: 157975 - RNA, 22 nt, synthetic construct
  source 1..22: mol_type = other RNA
ttgtttgtgaagatacaaatag

SEQ ID NO: 157976 - RNA, 22 nt, synthetic construct
  source 1..22: mol_type = other RNA
ttgtttgttgggtttaactgag

SEQ ID NO: 157977 - RNA, 22 nt, synthetic construct
  source 1..22: mol_type = other RNA
ttgtttgtttctgaggtggagt

SEQ ID NO: 157978 - RNA, 22 nt, synthetic construct
  source 1..22: mol_type = other RNA
ttgttttaccatctaaagccag

SEQ ID NO: 157979 - RNA, 22 nt, synthetic construct
  source 1..22: mol_type = other RNA
ttgttttaggtagtcttgtcat

SEQ ID NO: 157980 - RNA, 22 nt, synthetic construct
  source 1..22: mol_type = other RNA
ttgttttcccttttgtagctaa

SEQ ID NO: 157981 - RNA, 22 nt, synthetic construct
  source 1..22: mol_type = other RNA
ttgttttctccttctggaagat

SEQ ID NO: 157982 - RNA, 22 nt, synthetic construct
  source 1..22: mol_type = other RNA
ttgttttcttattttttcccag

SEQ ID NO: 157983 - RNA, 22 nt, synthetic construct
  source 1..22: mol_type = other RNA
ttgttttgaataacctcataag

SEQ ID NO: 157984 - RNA, 22 nt, synthetic construct
  source 1..22: mol_type = other RNA
ttgttttgatttgcatttctct

SEQ ID NO: 157985 - RNA, 22 nt, synthetic construct
  source 1..22: mol_type = other RNA
ttgttttgcaagattaatcttg

SEQ ID NO: 157986 - RNA, 22 nt, synthetic construct
  source 1..22: mol_type = other RNA
ttgttttggtcaaaactgtatt

SEQ ID NO: 157987 - RNA, 22 nt, synthetic construct
  source 1..22: mol_type = other RNA
ttgttttgtgtttgtgaccaga

SEQ ID NO: 157988 - RNA, 22 nt, synthetic construct
  source 1..22: mol_type = other RNA
ttgttttgttctcgttcatgtt

SEQ ID NO: 157989 - RNA, 22 nt, synthetic construct
  source 1..22: mol_type = other RNA
ttgttttgttgctattgttgaa

SEQ ID NO: 157990 - RNA, 22 nt, synthetic construct
  source 1..22: mol_type = other RNA
ttgttttgtttttctctccttg

SEQ ID NO: 157991 - RNA, 22 nt, synthetic construct
  source 1..22: mol_type = other RNA
ttgtttttatatgcattaagcc

SEQ ID NO: 157992 - RNA, 22 nt, synthetic construct
  source 1..22: mol_type = other RNA
ttgtttttctctccttgcacat

SEQ ID NO: 157993 - RNA, 22 nt, synthetic construct
  source 1..22: mol_type = other RNA
ttgtttttcttttttgagttgg

SEQ ID NO: 157994 - RNA, 22 nt, synthetic construct
  source 1..22: mol_type = other RNA
ttgttttttcacagaaacagaa

SEQ ID NO: 157995 - RNA, 22 nt, synthetic construct
  source 1..22: mol_type = other RNA
tttaaaaacaacactaaccaac

SEQ ID NO: 157996 - RNA, 22 nt, synthetic construct
  source 1..22: mol_type = other RNA
tttaaaaactttttgggccttt

SEQ ID NO: 157997 - RNA, 22 nt, synthetic construct
  source 1..22: mol_type = other RNA
tttaaaaagaaaaagctcacct

SEQ ID NO: 157998 - RNA, 22 nt, synthetic construct
  source 1..22: mol_type = other RNA
tttaaaaagcagctacctgttg

SEQ ID NO: 157999 - RNA, 22 nt, synthetic construct
  source 1..22: mol_type = other RNA
tttaaaacactggcaaaaatca

SEQ ID NO: 158000 - RNA, 22 nt, synthetic construct
  source 1..22: mol_type = other RNA
tttaaaaccagagcggaatttt

SEQ ID NO: 158001 - RNA, 22 nt, synthetic construct
  source 1..22: mol_type = other RNA
tttaaaactgctgagtcttcta

SEQ ID NO: 158002 - RNA, 22 nt, synthetic construct
  source 1..22: mol_type = other RNA
tttaaaagaaaatggccaagag

SEQ ID NO: 158003 - RNA, 22 nt, synthetic construct
  source 1..22: mol_type = other RNA
tttaaaagaacctctggaaagg

SEQ ID NO: 158004 - RNA, 22 nt, synthetic construct
  source 1..22: mol_type = other RNA
tttaaaagagcgaagagggaga

SEQ ID NO: 158005 - RNA, 22 nt, synthetic construct
  source 1..22: mol_type = other RNA
tttaaaagagtgcacattcctt

SEQ ID NO: 158006 - RNA, 22 nt, synthetic construct
  source 1..22: mol_type = other RNA
tttaaaagatatccacagtatg

SEQ ID NO: 158007 - RNA, 22 nt, synthetic construct
  source 1..22: mol_type = other RNA
tttaaaagatgcattctgtcac

SEQ ID NO: 158008 - RNA, 22 nt, synthetic construct
  source 1..22: mol_type = other RNA
tttaaaagtcagctaggcgtag

SEQ ID NO: 158009 - RNA, 22 nt, synthetic construct
  source 1..22: mol_type = other RNA
tttaaaatctgattcagtggtt

SEQ ID NO: 158010 - RNA, 22 nt, synthetic construct
  source 1..22: mol_type = other RNA
tttaaaatgatagcattatccc

SEQ ID NO: 158011 - RNA, 22 nt, synthetic construct
  source 1..22: mol_type = other RNA
tttaaaattgcagagtgttcaa

SEQ ID NO: 158012 - RNA, 22 nt, synthetic construct
  source 1..22: mol_type = other RNA
tttaaacaggtgtaagagatta

SEQ ID NO: 158013 - RNA, 22 nt, synthetic construct
  source 1..22: mol_type = other RNA
tttaaacccatttcatgccatc

SEQ ID NO: 158014 - RNA, 22 nt, synthetic construct
  source 1..22: mol_type = other RNA
tttaaacgtcagagcagcactg

SEQ ID NO: 158015 - RNA, 22 nt, synthetic construct
  source 1..22: mol_type = other RNA
tttaaactggatgaatacaaag

SEQ ID NO: 158016 - RNA, 22 nt, synthetic construct
  source 1..22: mol_type = other RNA
tttaaagaaaggtctctctctg

SEQ ID NO: 158017 - RNA, 22 nt, synthetic construct
  source 1..22: mol_type = other RNA
tttaaagacctcaggtttagaa

SEQ ID NO: 158018 - RNA, 22 nt, synthetic construct
  source 1..22: mol_type = other RNA
tttaaagacgttcagataacaa

SEQ ID NO: 158019 - RNA, 22 nt, synthetic construct
  source 1..22: mol_type = other RNA
tttaaagcagggaggggtcccc

SEQ ID NO: 158020 - RNA, 22 nt, synthetic construct
  source 1..22: mol_type = other RNA
tttaaagctctaataaaagctg

SEQ ID NO: 158021 - RNA, 22 nt, synthetic construct
  source 1..22: mol_type = other RNA
tttaaagctctatggcatttga

SEQ ID NO: 158022 - RNA, 22 nt, synthetic construct
  source 1..22: mol_type = other RNA
tttaaagctgaactcctttctt

SEQ ID NO: 158023 - RNA, 22 nt, synthetic construct
  source 1..22: mol_type = other RNA
tttaaagctttgtgactgtgag

SEQ ID NO: 158024 - RNA, 22 nt, synthetic construct
  source 1..22: mol_type = other RNA
tttaaagggataatgctatcca

SEQ ID NO: 158025 - RNA, 22 nt, synthetic construct
  source 1..22: mol_type = other RNA
tttaaagtaggttgagacttag

SEQ ID NO: 158026 - RNA, 22 nt, synthetic construct
  source 1..22: mol_type = other RNA
tttaaagtgtaaagtttctctc

SEQ ID NO: 158027 - RNA, 22 nt, synthetic construct
  source 1..22: mol_type = other RNA
tttaaagttagtgaagcagaga

SEQ ID NO: 158028 - RNA, 22 nt, synthetic construct
  source 1..22: mol_type = other RNA
tttaaatcagcaccatctaaca

SEQ ID NO: 158029 - RNA, 22 nt, synthetic construct
  source 1..22: mol_type = other RNA
tttaaatcagggcctttaatca

SEQ ID NO: 158030 - RNA, 22 nt, synthetic construct
  source 1..22: mol_type = other RNA
tttaaatgccaatttgggatat

SEQ ID NO: 158031 - RNA, 22 nt, synthetic construct
  source 1..22: mol_type = other RNA
tttaaatgccacataaatcaca

SEQ ID NO: 158032 - RNA, 22 nt, synthetic construct
  source 1..22: mol_type = other RNA
tttaaatgtacaacattcatcc

SEQ ID NO: 158033 - RNA, 22 nt, synthetic construct
  source 1..22: mol_type = other RNA
tttaaatgttttgcagagatga

SEQ ID NO: 158034 - RNA, 22 nt, synthetic construct
  source 1..22: mol_type = other RNA
tttaaattttgagacctcaggc

SEQ ID NO: 158035 - RNA, 22 nt, synthetic construct
  source 1..22: mol_type = other RNA
tttaacacacaacaatgaattc

SEQ ID NO: 158036 - RNA, 22 nt, synthetic construct
  source 1..22: mol_type = other RNA
tttaacaccatggcaggtttca

SEQ ID NO: 158037 - RNA, 22 nt, synthetic construct
  source 1..22: mol_type = other RNA
tttaacagatggtcctttttta

SEQ ID NO: 158038 - RNA, 22 nt, synthetic construct
  source 1..22: mol_type = other RNA
tttaaccaattatgctgagtga

SEQ ID NO: 158039 - RNA, 22 nt, synthetic construct
  source 1..22: mol_type = other RNA
tttaacccacagataatttctt

SEQ ID NO: 158040 - RNA, 22 nt, synthetic construct
  source 1..22: mol_type = other RNA
tttaacctctggtattttaaga

SEQ ID NO: 158041 - RNA, 22 nt, synthetic construct
  source 1..22: mol_type = other RNA
tttaacctcttgaagtcagtta

SEQ ID NO: 158042 - RNA, 22 nt, synthetic construct
  source 1..22: mol_type = other RNA
tttaacgtatctgggaaaaaat

SEQ ID NO: 158043 - RNA, 22 nt, synthetic construct
  source 1..22: mol_type = other RNA
tttaactatcctatgtggggaa

SEQ ID NO: 158044 - RNA, 22 nt, synthetic construct
  source 1..22: mol_type = other RNA
tttaactcttgcattagagccc

SEQ ID NO: 158045 - RNA, 22 nt, synthetic construct
  source 1..22: mol_type = other RNA
tttaactgaggtgtttttcagc

SEQ ID NO: 158046 - RNA, 22 nt, synthetic construct
  source 1..22: mol_type = other RNA
tttaacttctaatgcccattaa

SEQ ID NO: 158047 - RNA, 22 nt, synthetic construct
  source 1..22: mol_type = other RNA
tttaacttgctttgaatttgga

SEQ ID NO: 158048 - RNA, 22 nt, synthetic construct
  source 1..22: mol_type = other RNA
tttaactttgatgaattccagt

SEQ ID NO: 158049 - RNA, 22 nt, synthetic construct
  source 1..22: mol_type = other RNA
tttaagaaaagaagttacggtt

SEQ ID NO: 158050 - RNA, 22 nt, synthetic construct
  source 1..22: mol_type = other RNA
tttaagaaaatcattgttcagg

SEQ ID NO: 158051 - RNA, 22 nt, synthetic construct
  source 1..22: mol_type = other RNA
tttaagaagggaacactaagaa

SEQ ID NO: 158052 - RNA, 22 nt, synthetic construct
  source 1..22: mol_type = other RNA
tttaagacacaaggaaggtcaa

SEQ ID NO: 158053 - RNA, 22 nt, synthetic construct
  source 1..22: mol_type = other RNA
tttaagagaggaagtgaccctg

SEQ ID NO: 158054 - RNA, 22 nt, synthetic construct
  source 1..22: mol_type = other RNA
tttaagagtatctttttcagca

SEQ ID NO: 158055 - RNA, 22 nt, synthetic construct
  source 1..22: mol_type = other RNA
tttaagagtgaagaaacctttc

SEQ ID NO: 158056 - RNA, 22 nt, synthetic construct
  source 1..22: mol_type = other RNA
tttaagattctctttagggaag

SEQ ID NO: 158057 - RNA, 22 nt, synthetic construct
  source 1..22: mol_type = other RNA
tttaagcatcccatatggaggc

SEQ ID NO: 158058 - RNA, 22 nt, synthetic construct
  source 1..22: mol_type = other RNA
tttaagcctagagattaggcag

SEQ ID NO: 158059 - RNA, 22 nt, synthetic construct
  source 1..22: mol_type = other RNA
tttaaggaccaggtatggcgac

SEQ ID NO: 158060 - RNA, 22 nt, synthetic construct
  source 1..22: mol_type = other RNA
tttaaggcagggcttggtggcc

SEQ ID NO: 158061 - RNA, 22 nt, synthetic construct
  source 1..22: mol_type = other RNA
tttaaggcgcagacacaccatg

SEQ ID NO: 158062 - RNA, 22 nt, synthetic construct
  source 1..22: mol_type = other RNA
tttaaggctaaaacatacatga

SEQ ID NO: 158063 - RNA, 22 nt, synthetic construct
  source 1..22: mol_type = other RNA
tttaaggctgaacaatattcca

SEQ ID NO: 158064 - RNA, 22 nt, synthetic construct
  source 1..22: mol_type = other RNA
tttaaggcttggaaaacaaatt

SEQ ID NO: 158065 - RNA, 22 nt, synthetic construct
  source 1..22: mol_type = other RNA
tttaagggaaacactcatacca

SEQ ID NO: 158066 - RNA, 22 nt, synthetic construct
  source 1..22: mol_type = other RNA
tttaaggggtaaatggtttctc

SEQ ID NO: 158067 - RNA, 22 nt, synthetic construct
  source 1..22: mol_type = other RNA
tttaaggtaagggtccagcttc

SEQ ID NO: 158068 - RNA, 22 nt, synthetic construct
  source 1..22: mol_type = other RNA
tttaagtgcacaatgcagtatt

SEQ ID NO: 158069 - RNA, 22 nt, synthetic construct
  source 1..22: mol_type = other RNA
tttaagtggcgctgtttgcctg

SEQ ID NO: 158070 - RNA, 22 nt, synthetic construct
  source 1..22: mol_type = other RNA
tttaagttactgattagaagga

SEQ ID NO: 158071 - RNA, 22 nt, synthetic construct
  source 1..22: mol_type = other RNA
tttaagttctccaagttattac

SEQ ID NO: 158072 - RNA, 22 nt, synthetic construct
  source 1..22: mol_type = other RNA
tttaataagcttcgaagcaaaa

SEQ ID NO: 158073 - RNA, 22 nt, synthetic construct
  source 1..22: mol_type = other RNA
tttaatactatgtatgtggctc

SEQ ID NO: 158074 - RNA, 22 nt, synthetic construct
  source 1..22: mol_type = other RNA
tttaatagaggtctgtctttca

SEQ ID NO: 158075 - RNA, 22 nt, synthetic construct
  source 1..22: mol_type = other RNA
tttaatatgtgtacaatggggc

SEQ ID NO: 158076 - RNA, 22 nt, synthetic construct
  source 1..22: mol_type = other RNA
tttaatcaccaggcgcggtggc

SEQ ID NO: 158077 - RNA, 22 nt, synthetic construct
  source 1..22: mol_type = other RNA
tttaatcacctcaagtgatgca

SEQ ID NO: 158078 - RNA, 22 nt, synthetic construct
  source 1..22: mol_type = other RNA
tttaatcgaatcctcacaacag

SEQ ID NO: 158079 - RNA, 22 nt, synthetic construct
  source 1..22: mol_type = other RNA
tttaatctacaaaacagggtta

SEQ ID NO: 158080 - RNA, 22 nt, synthetic construct
  source 1..22: mol_type = other RNA
tttaatctctcttgaccttagt

SEQ ID NO: 158081 - RNA, 22 nt, synthetic construct
  source 1..22: mol_type = other RNA
tttaatctgtcagcagttcagc

SEQ ID NO: 158082 - RNA, 22 nt, synthetic construct
  source 1..22: mol_type = other RNA
tttaatctgtcctgaatactat

SEQ ID NO: 158083 - RNA, 22 nt, synthetic construct
  source 1..22: mol_type = other RNA
tttaatgagtagtacttctgag

SEQ ID NO: 158084 - RNA, 22 nt, synthetic construct
  source 1..22: mol_type = other RNA
tttaatgggcattagaagttaa

SEQ ID NO: 158085 - RNA, 22 nt, synthetic construct
  source 1..22: mol_type = other RNA
tttaatgtagatcctgaggaag

SEQ ID NO: 158086 - RNA, 22 nt, synthetic construct
  source 1..22: mol_type = other RNA
tttaatgtgctgtccatttcct

SEQ ID NO: 158087 - RNA, 22 nt, synthetic construct
  source 1..22: mol_type = other RNA
tttaattacccaggcatgatgg

SEQ ID NO: 158088 - RNA, 22 nt, synthetic construct
  source 1..22: mol_type = other RNA
tttaattagccgggtgtagtgg

SEQ ID NO: 158089 - RNA, 22 nt, synthetic construct
  source 1..22: mol_type = other RNA
tttaattatgagcattccccac

SEQ ID NO: 158090 - RNA, 22 nt, synthetic construct
  source 1..22: mol_type = other RNA
tttaattcctactttcttcaac

SEQ ID NO: 158091 - RNA, 22 nt, synthetic construct
  source 1..22: mol_type = other RNA
tttaattctatctgaactttcg

SEQ ID NO: 158092 - RNA, 22 nt, synthetic construct
  source 1..22: mol_type = other RNA
tttaattctgtttacccttact

SEQ ID NO: 158093 - RNA, 22 nt, synthetic construct
  source 1..22: mol_type = other RNA
tttaattcttaaactgccaaac

SEQ ID NO: 158094 - RNA, 22 nt, synthetic construct
  source 1..22: mol_type = other RNA
tttaattcttttgctgtatacc

SEQ ID NO: 158095 - RNA, 22 nt, synthetic construct
  source 1..22: mol_type = other RNA
tttaattgggggaaaattgaca

SEQ ID NO: 158096 - RNA, 22 nt, synthetic construct
  source 1..22: mol_type = other RNA
tttaatttagcgttcatccaaa

SEQ ID NO: 158097 - RNA, 22 nt, synthetic construct
  source 1..22: mol_type = other RNA
tttaatttccacccatgaagcc

SEQ ID NO: 158098 - RNA, 22 nt, synthetic construct
  source 1..22: mol_type = other RNA
tttaatttgggtttgagtttcc

SEQ ID NO: 158099 - RNA, 22 nt, synthetic construct
  source 1..22: mol_type = other RNA
tttaattttctgactctgtgct

SEQ ID NO: 158100 - RNA, 22 nt, synthetic construct
  source 1..22: mol_type = other RNA
tttaattttgagagtgcagtat

SEQ ID NO: 158101 - RNA, 22 nt, synthetic construct
  source 1..22: mol_type = other RNA
tttaatttttgtcaagtgactc

SEQ ID NO: 158102 - RNA, 22 nt, synthetic construct
  source 1..22: mol_type = other RNA
tttacaaaaacacactgagctt

SEQ ID NO: 158103 - RNA, 22 nt, synthetic construct
  source 1..22: mol_type = other RNA
tttacaagtacatgaaatactc

SEQ ID NO: 158104 - RNA, 22 nt, synthetic construct
  source 1..22: mol_type = other RNA
tttacacacctgaaattctcaa

SEQ ID NO: 158105 - RNA, 22 nt, synthetic construct
  source 1..22: mol_type = other RNA
tttacacatgtcagccacaaga

SEQ ID NO: 158106 - RNA, 22 nt, synthetic construct
  source 1..22: mol_type = other RNA
tttacaccatgcaggttcatgt

SEQ ID NO: 158107 - RNA, 22 nt, synthetic construct
  source 1..22: mol_type = other RNA
tttacaccctaggtagggttgg

SEQ ID NO: 158108 - RNA, 22 nt, synthetic construct
  source 1..22: mol_type = other RNA
tttacacgccttcgcgggcacc

SEQ ID NO: 158109 - RNA, 22 nt, synthetic construct
  source 1..22: mol_type = other RNA
tttacactatggcttttgagtg

SEQ ID NO: 158110 - RNA, 22 nt, synthetic construct
  source 1..22: mol_type = other RNA
tttacacttggagttttccccc

SEQ ID NO: 158111 - RNA, 22 nt, synthetic construct
  source 1..22: mol_type = other RNA
tttacaggatatcagaagtgct

SEQ ID NO: 158112 - RNA, 22 nt, synthetic construct
  source 1..22: mol_type = other RNA
tttacagtagccaaaggtagaa

SEQ ID NO: 158113 - RNA, 22 nt, synthetic construct
  source 1..22: mol_type = other RNA
tttacagttatgtcagtcaaca

SEQ ID NO: 158114 - RNA, 22 nt, synthetic construct
  source 1..22: mol_type = other RNA
tttacatagtgctcttctgatc

SEQ ID NO: 158115 - RNA, 22 nt, synthetic construct
  source 1..22: mol_type = other RNA
tttacatatagaagtaaatccc

SEQ ID NO: 158116 - RNA, 22 nt, synthetic construct
  source 1..22: mol_type = other RNA
tttacatgtagttttccctgtg

SEQ ID NO: 158117 - RNA, 22 nt, synthetic construct
  source 1..22: mol_type = other RNA
tttacattaaagacagctacta

SEQ ID NO: 158118 - RNA, 22 nt, synthetic construct
  source 1..22: mol_type = other RNA
tttacattagagaagaatgaga

SEQ ID NO: 158119 - RNA, 22 nt, synthetic construct
  source 1..22: mol_type = other RNA
tttaccaaaacagcttcttgtt

SEQ ID NO: 158120 - RNA, 22 nt, synthetic construct
  source 1..22: mol_type = other RNA
tttaccaaggctaagttgagaa

SEQ ID NO: 158121 - RNA, 22 nt, synthetic construct
  source 1..22: mol_type = other RNA
tttaccaagggtgtgtttaatt

SEQ ID NO: 158122 - RNA, 22 nt, synthetic construct
  source 1..22: mol_type = other RNA
tttaccaagttgaatttctgtc

SEQ ID NO: 158123 - RNA, 22 nt, synthetic construct
  source 1..22: mol_type = other RNA
tttaccatctaaagccaggctt

SEQ ID NO: 158124 - RNA, 22 nt, synthetic construct
  source 1..22: mol_type = other RNA
tttaccatctgacatatgtttt

SEQ ID NO: 158125 - RNA, 22 nt, synthetic construct
  source 1..22: mol_type = other RNA
tttacccaacatgagagaaaat

SEQ ID NO: 158126 - RNA, 22 nt, synthetic construct
  source 1..22: mol_type = other RNA
tttacccagtgtgtttgtttgc

SEQ ID NO: 158127 - RNA, 22 nt, synthetic construct
  source 1..22: mol_type = other RNA
tttacccctactttttgtcaca

SEQ ID NO: 158128 - RNA, 22 nt, synthetic construct
  source 1..22: mol_type = other RNA
tttacccctgagaacttcagta

SEQ ID NO: 158129 - RNA, 22 nt, synthetic construct
  source 1..22: mol_type = other RNA
tttaccccttaaattccaaaag

SEQ ID NO: 158130 - RNA, 22 nt, synthetic construct
  source 1..22: mol_type = other RNA
tttacccggagaggtgaactat

SEQ ID NO: 158131 - RNA, 22 nt, synthetic construct
  source 1..22: mol_type = other RNA
tttacccgtggaaatacttgaa

SEQ ID NO: 158132 - RNA, 22 nt, synthetic construct
  source 1..22: mol_type = other RNA
tttaccctcattttataagggt

SEQ ID NO: 158133 - RNA, 22 nt, synthetic construct
  source 1..22: mol_type = other RNA
tttaccctgctggaacgaatat

SEQ ID NO: 158134 - RNA, 22 nt, synthetic construct
  source 1..22: mol_type = other RNA
tttacccttactaaattttgag

SEQ ID NO: 158135 - RNA, 22 nt, synthetic construct
  source 1..22: mol_type = other RNA
tttacgaggacagactgcagtt

SEQ ID NO: 158136 - RNA, 22 nt, synthetic construct
  source 1..22: mol_type = other RNA
tttacgatgaaattgaccattc

SEQ ID NO: 158137 - RNA, 22 nt, synthetic construct
  source 1..22: mol_type = other RNA
tttactaaactgaacgaagtga

SEQ ID NO: 158138 - RNA, 22 nt, synthetic construct
  source 1..22: mol_type = other RNA
tttactaagaagtgaaactgct

SEQ ID NO: 158139 - RNA, 22 nt, synthetic construct
  source 1..22: mol_type = other RNA
tttactactgcattttttgcca

SEQ ID NO: 158140 - RNA, 22 nt, synthetic construct
  source 1..22: mol_type = other RNA
tttactactgtactgtttagca

SEQ ID NO: 158141 - RNA, 22 nt, synthetic construct
  source 1..22: mol_type = other RNA
tttactagatcaagcccttcct

SEQ ID NO: 158142 - RNA, 22 nt, synthetic construct
  source 1..22: mol_type = other RNA
tttactcagattcaccaattgt

SEQ ID NO: 158143 - RNA, 22 nt, synthetic construct
  source 1..22: mol_type = other RNA
tttactcatgtctacctgtctt

SEQ ID NO: 158144 - RNA, 22 nt, synthetic construct
  source 1..22: mol_type = other RNA
tttactccaagaaggctagcac

SEQ ID NO: 158145 - RNA, 22 nt, synthetic construct
  source 1..22: mol_type = other RNA
tttactcgagggtagcttttcc

SEQ ID NO: 158146 - RNA, 22 nt, synthetic construct
  source 1..22: mol_type = other RNA
tttactctctttaattatgagc

SEQ ID NO: 158147 - RNA, 22 nt, synthetic construct
  source 1..22: mol_type = other RNA
tttactgaaatcctagccccaa

SEQ ID NO: 158148 - RNA, 22 nt, synthetic construct
  source 1..22: mol_type = other RNA
tttactgatcttttctgacaat

SEQ ID NO: 158149 - RNA, 22 nt, synthetic construct
  source 1..22: mol_type = other RNA
tttactgctataaacttccctc

SEQ ID NO: 158150 - RNA, 22 nt, synthetic construct
  source 1..22: mol_type = other RNA
tttactgctatacaaccggaaa

SEQ ID NO: 158151 - RNA, 22 nt, synthetic construct
  source 1..22: mol_type = other RNA
tttactgcttgctgcactggct

SEQ ID NO: 158152 - RNA, 22 nt, synthetic construct
  source 1..22: mol_type = other RNA
tttactgtattaggatgtgtac

SEQ ID NO: 158153 - RNA, 22 nt, synthetic construct
  source 1..22: mol_type = other RNA
tttactgtccaaacagtgacca

SEQ ID NO: 158154 - RNA, 22 nt, synthetic construct
  source 1..22: mol_type = other RNA
tttactgttctccagtcccact

SEQ ID NO: 158155 - RNA, 22 nt, synthetic construct
  source 1..22: mol_type = other RNA
tttacttactagttgtgctacc

SEQ ID NO: 158156 - RNA, 22 nt, synthetic construct
  source 1..22: mol_type = other RNA
tttacttcccttctcgaagtgg

SEQ ID NO: 158157 - RNA, 22 nt, synthetic construct
  source 1..22: mol_type = other RNA
tttacttctacagaatgttcaa

SEQ ID NO: 158158 - RNA, 22 nt, synthetic construct
  source 1..22: mol_type = other RNA
tttacttgcttggtttcacacg

SEQ ID NO: 158159 - RNA, 22 nt, synthetic construct
  source 1..22: mol_type = other RNA
tttacttggctcctcccggcta

SEQ ID NO: 158160 - RNA, 22 nt, synthetic construct
  source 1..22: mol_type = other RNA
tttacttggggagagtgggccc

SEQ ID NO: 158161 - RNA, 22 nt, synthetic construct
  source 1..22: mol_type = other RNA
tttacttgggtataaatgatga

SEQ ID NO: 158162 - RNA, 22 nt, synthetic construct
  source 1..22: mol_type = other RNA
tttacttgtcatttctgcttag

SEQ ID NO: 158163 - RNA, 22 nt, synthetic construct
  source 1..22: mol_type = other RNA
tttactttcagctcaaacagct

SEQ ID NO: 158164 - RNA, 22 nt, synthetic construct
  source 1..22: mol_type = other RNA
tttactttgcgaaacacactcg

SEQ ID NO: 158165 - RNA, 22 nt, synthetic construct
  source 1..22: mol_type = other RNA
tttagaaaacatatccttctac

SEQ ID NO: 158166 - RNA, 22 nt, synthetic construct
  source 1..22: mol_type = other RNA
tttagaaaatacagttttgacc

SEQ ID NO: 158167 - RNA, 22 nt, synthetic construct
  source 1..22: mol_type = other RNA
tttagaaaatgcttatgtcttg

SEQ ID NO: 158168 - RNA, 22 nt, synthetic construct
  source 1..22: mol_type = other RNA
tttagaaagaaaatccaaaagc

SEQ ID NO: 158169 - RNA, 22 nt, synthetic construct
  source 1..22: mol_type = other RNA
tttagaaatacctgcaggttga

SEQ ID NO: 158170 - RNA, 22 nt, synthetic construct
  source 1..22: mol_type = other RNA
tttagaacatataatccaactg

SEQ ID NO: 158171 - RNA, 22 nt, synthetic construct
  source 1..22: mol_type = other RNA
tttagaaggtaagaatgtcaag

SEQ ID NO: 158172 - RNA, 22 nt, synthetic construct
  source 1..22: mol_type = other RNA
tttagaattctctctcaactgg

SEQ ID NO: 158173 - RNA, 22 nt, synthetic construct
  source 1..22: mol_type = other RNA
tttagacatgggctaaataaaa

SEQ ID NO: 158174 - RNA, 22 nt, synthetic construct
  source 1..22: mol_type = other RNA
tttagagagatgcctgtgcttg

SEQ ID NO: 158175 - RNA, 22 nt, synthetic construct
  source 1..22: mol_type = other RNA
tttagagggatgaatgttgtac

SEQ ID NO: 158176 - RNA, 22 nt, synthetic construct
  source 1..22: mol_type = other RNA
tttagagtaactgtcatcagcg

SEQ ID NO: 158177 - RNA, 22 nt, synthetic construct
  source 1..22: mol_type = other RNA
tttagagtcagttgtttacttg

SEQ ID NO: 158178 - RNA, 22 nt, synthetic construct
  source 1..22: mol_type = other RNA
tttagagtttgcattacatgaa

SEQ ID NO: 158179 - RNA, 22 nt, synthetic construct
  source 1..22: mol_type = other RNA
tttagatcaagtcctttccaga

SEQ ID NO: 158180 - RNA, 22 nt, synthetic construct
  source 1..22: mol_type = other RNA
tttagatctcatgttaagtgtt

SEQ ID NO: 158181 - RNA, 22 nt, synthetic construct
  source 1..22: mol_type = other RNA
tttagatgagagtggcctaaat

SEQ ID NO: 158182 - RNA, 22 nt, synthetic construct
  source 1..22: mol_type = other RNA
tttagatggtaaaacaaattcc

SEQ ID NO: 158183 - RNA, 22 nt, synthetic construct
  source 1..22: mol_type = other RNA
tttagatttatcaatagcagtg

SEQ ID NO: 158184 - RNA, 22 nt, synthetic construct
  source 1..22: mol_type = other RNA
tttagcaagattactggataca

SEQ ID NO: 158185 - RNA, 22 nt, synthetic construct
  source 1..22: mol_type = other RNA
tttagcaatccaaggacagaaa

SEQ ID NO: 158186 - RNA, 22 nt, synthetic construct
  source 1..22: mol_type = other RNA
tttagcatctagcacagaacca

SEQ ID NO: 158187 - RNA, 22 nt, synthetic construct
  source 1..22: mol_type = other RNA
tttagccaacaaccataatgag

SEQ ID NO: 158188 - RNA, 22 nt, synthetic construct
  source 1..22: mol_type = other RNA
tttagcccatgtctaaagtatt

SEQ ID NO: 158189 - RNA, 22 nt, synthetic construct
  source 1..22: mol_type = other RNA
tttagccccctgaatacccctc

SEQ ID NO: 158190 - RNA, 22 nt, synthetic construct
  source 1..22: mol_type = other RNA
tttagcggaatgactatagaaa

SEQ ID NO: 158191 - RNA, 22 nt, synthetic construct
  source 1..22: mol_type = other RNA
tttagcgttcatccaaattatt

SEQ ID NO: 158192 - RNA, 22 nt, synthetic construct
  source 1..22: mol_type = other RNA
tttagctggggcagcaaagcaa

SEQ ID NO: 158193 - RNA, 22 nt, synthetic construct
  source 1..22: mol_type = other RNA
tttagcttcatataagtggaat

SEQ ID NO: 158194 - RNA, 22 nt, synthetic construct
  source 1..22: mol_type = other RNA
tttagcttctgaattgagatgt

SEQ ID NO: 158195 - RNA, 22 nt, synthetic construct
  source 1..22: mol_type = other RNA
tttaggaaaatagagttccatc

SEQ ID NO: 158196 - RNA, 22 nt, synthetic construct
  source 1..22: mol_type = other RNA
tttaggaagcacattccttccg

SEQ ID NO: 158197 - RNA, 22 nt, synthetic construct
  source 1..22: mol_type = other RNA
tttaggaagcttccttgatcag

SEQ ID NO: 158198 - RNA, 22 nt, synthetic construct
  source 1..22: mol_type = other RNA
tttaggacaaggaaaggatggt

SEQ ID NO: 158199 - RNA, 22 nt, synthetic construct
  source 1..22: mol_type = other RNA
tttaggagtcaactaatcaaac

SEQ ID NO: 158200 - RNA, 22 nt, synthetic construct
  source 1..22: mol_type = other RNA
tttaggatataagagtgggcaa

SEQ ID NO: 158201 - RNA, 22 nt, synthetic construct
  source 1..22: mol_type = other RNA
tttaggccactctcatctaaat

SEQ ID NO: 158202 - RNA, 22 nt, synthetic construct
  source 1..22: mol_type = other RNA
tttaggccctctataattctgc

SEQ ID NO: 158203 - RNA, 22 nt, synthetic construct
  source 1..22: mol_type = other RNA
tttaggctctgtggtttcttga

SEQ ID NO: 158204 - RNA, 22 nt, synthetic construct
  source 1..22: mol_type = other RNA
tttaggctgtctccaacgcttt

SEQ ID NO: 158205 - RNA, 22 nt, synthetic construct
  source 1..22: mol_type = other RNA
tttaggctgttcaatttagaaa

SEQ ID NO: 158206 - RNA, 22 nt, synthetic construct
  source 1..22: mol_type = other RNA
tttagggaagatagtactgacc

SEQ ID NO: 158207 - RNA, 22 nt, synthetic construct
  source 1..22: mol_type = other RNA
tttagggacgaatgcatgggag

SEQ ID NO: 158208 - RNA, 22 nt, synthetic construct
  source 1..22: mol_type = other RNA
tttagggagcatatatactctg

SEQ ID NO: 158209 - RNA, 22 nt, synthetic construct
  source 1..22: mol_type = other RNA
tttaggggggaaaacacccttg

SEQ ID NO: 158210 - RNA, 22 nt, synthetic construct
  source 1..22: mol_type = other RNA
tttaggtagggataagaatacc

SEQ ID NO: 158211 - RNA, 22 nt, synthetic construct
  source 1..22: mol_type = other RNA
tttaggtagtcttgtcataaca

SEQ ID NO: 158212 - RNA, 22 nt, synthetic construct
  source 1..22: mol_type = other RNA
tttaggtcagaatacaaaaatg

SEQ ID NO: 158213 - RNA, 22 nt, synthetic construct
  source 1..22: mol_type = other RNA
tttaggtcatttttcacttctt

SEQ ID NO: 158214 - RNA, 22 nt, synthetic construct
  source 1..22: mol_type = other RNA
tttaggtgccccactccacaca

SEQ ID NO: 158215 - RNA, 22 nt, synthetic construct
  source 1..22: mol_type = other RNA
tttaggtgttttttccttcttt

SEQ ID NO: 158216 - RNA, 22 nt, synthetic construct
  source 1..22: mol_type = other RNA
tttaggttacgtactaggtatc

SEQ ID NO: 158217 - RNA, 22 nt, synthetic construct
  source 1..22: mol_type = other RNA
tttaggtttttcttgtgggtat

SEQ ID NO: 158218 - RNA, 22 nt, synthetic construct
  source 1..22: mol_type = other RNA
tttagtaaatctttggtgaagg

SEQ ID NO: 158219 - RNA, 22 nt, synthetic construct
  source 1..22: mol_type = other RNA
tttagtaagaggtatcaccatc

SEQ ID NO: 158220 - RNA, 22 nt, synthetic construct
  source 1..22: mol_type = other RNA
tttagtaagggtaaacagaatt

SEQ ID NO: 158221 - RNA, 22 nt, synthetic construct
  source 1..22: mol_type = other RNA
tttagtaagtgtgagcaaaaat

SEQ ID NO: 158222 - RNA, 22 nt, synthetic construct
  source 1..22: mol_type = other RNA
tttagtaattctccactttcat

SEQ ID NO: 158223 - RNA, 22 nt, synthetic construct
  source 1..22: mol_type = other RNA
tttagtagaattctccagtgaa

SEQ ID NO: 158224 - RNA, 22 nt, synthetic construct
  source 1..22: mol_type = other RNA
tttagtagagatgaggttttac

SEQ ID NO: 158225 - RNA, 22 nt, synthetic construct
  source 1..22: mol_type = other RNA
tttagtagctgtctttaatgta

SEQ ID NO: 158226 - RNA, 22 nt, synthetic construct
  source 1..22: mol_type = other RNA
tttagtaggtctccttgtatgg

SEQ ID NO: 158227 - RNA, 22 nt, synthetic construct
  source 1..22: mol_type = other RNA
tttagtagtaagttgtgtcatt

SEQ ID NO: 158228 - RNA, 22 nt, synthetic construct
  source 1..22: mol_type = other RNA
tttagtatattttcaaggcttg

SEQ ID NO: 158229 - RNA, 22 nt, synthetic construct
  source 1..22: mol_type = other RNA
tttagtgaaatagttggtcaga

SEQ ID NO: 158230 - RNA, 22 nt, synthetic construct
  source 1..22: mol_type = other RNA
tttagtgactggcttaatgcat

SEQ ID NO: 158231 - RNA, 22 nt, synthetic construct
  source 1..22: mol_type = other RNA
tttagtgcagtatcttgaagaa

SEQ ID NO: 158232 - RNA, 22 nt, synthetic construct
  source 1..22: mol_type = other RNA
tttagtggctcacagtgctcca

SEQ ID NO: 158233 - RNA, 22 nt, synthetic construct
  source 1..22: mol_type = other RNA
tttagtgtattgtaccttgatt

SEQ ID NO: 158234 - RNA, 22 nt, synthetic construct
  source 1..22: mol_type = other RNA
tttagtgttctgtgtttatgaa

SEQ ID NO: 158235 - RNA, 22 nt, synthetic construct
  source 1..22: mol_type = other RNA
tttagtgttgcttggtgttgac

SEQ ID NO: 158236 - RNA, 22 nt, synthetic construct
  source 1..22: mol_type = other RNA
tttagttattaaatgagacacc

SEQ ID NO: 158237 - RNA, 22 nt, synthetic construct
  source 1..22: mol_type = other RNA
tttagtttacactatggctttt

SEQ ID NO: 158238 - RNA, 22 nt, synthetic construct
  source 1..22: mol_type = other RNA
tttagtttcatctatgtcccct

SEQ ID NO: 158239 - RNA, 22 nt, synthetic construct
  source 1..22: mol_type = other RNA
tttataaaaatggcacatactg

SEQ ID NO: 158240 - RNA, 22 nt, synthetic construct
  source 1..22: mol_type = other RNA
tttataagggtgataaaaagga

SEQ ID NO: 158241 - RNA, 22 nt, synthetic construct
  source 1..22: mol_type = other RNA
tttataatccattgggtacata

SEQ ID NO: 158242 - RNA, 22 nt, synthetic construct
  source 1..22: mol_type = other RNA
tttataatgggcaatcagaaaa

SEQ ID NO: 158243 - RNA, 22 nt, synthetic construct
  source 1..22: mol_type = other RNA
tttatacaaataactccagctt

SEQ ID NO: 158244 - RNA, 22 nt, synthetic construct
  source 1..22: mol_type = other RNA
tttatacaggtgcttacagact

SEQ ID NO: 158245 - RNA, 22 nt, synthetic construct
  source 1..22: mol_type = other RNA
tttatacagttggaactcttgc

SEQ ID NO: 158246 - RNA, 22 nt, synthetic construct
  source 1..22: mol_type = other RNA
tttatacccaagtaaacaactg

SEQ ID NO: 158247 - RNA, 22 nt, synthetic construct
  source 1..22: mol_type = other RNA
tttatacctgttgaatagcaac

SEQ ID NO: 158248 - RNA, 22 nt, synthetic construct
  source 1..22: mol_type = other RNA
tttatagtcttagctcttaagc

SEQ ID NO: 158249 - RNA, 22 nt, synthetic construct
  source 1..22: mol_type = other RNA
tttatagtgtttccttccagat

SEQ ID NO: 158250 - RNA, 22 nt, synthetic construct
  source 1..22: mol_type = other RNA
tttatatgcattaagccagtca

SEQ ID NO: 158251 - RNA, 22 nt, synthetic construct
  source 1..22: mol_type = other RNA
tttatatgcctagatgattcgc

SEQ ID NO: 158252 - RNA, 22 nt, synthetic construct
  source 1..22: mol_type = other RNA
tttatattatgtgcaagttctc

SEQ ID NO: 158253 - RNA, 22 nt, synthetic construct
  source 1..22: mol_type = other RNA
tttatatttactagatcaagcc

SEQ ID NO: 158254 - RNA, 22 nt, synthetic construct
  source 1..22: mol_type = other RNA
tttatatttccgatgatacctt

SEQ ID NO: 158255 - RNA, 22 nt, synthetic construct
  source 1..22: mol_type = other RNA
tttatattttggtagagatggg

SEQ ID NO: 158256 - RNA, 22 nt, synthetic construct
  source 1..22: mol_type = other RNA
tttatcaaaatcaaggtgcggg

SEQ ID NO: 158257 - RNA, 22 nt, synthetic construct
  source 1..22: mol_type = other RNA
tttatcaatagcagtgctgaaa

SEQ ID NO: 158258 - RNA, 22 nt, synthetic construct
  source 1..22: mol_type = other RNA
tttatcaattagttcctccttt

SEQ ID NO: 158259 - RNA, 22 nt, synthetic construct
  source 1..22: mol_type = other RNA
tttatcacccttataaaatgag

SEQ ID NO: 158260 - RNA, 22 nt, synthetic construct
  source 1..22: mol_type = other RNA
tttatcagatcccaattacttc

SEQ ID NO: 158261 - RNA, 22 nt, synthetic construct
  source 1..22: mol_type = other RNA
tttatcagcaccaaagattatg

SEQ ID NO: 158262 - RNA, 22 nt, synthetic construct
  source 1..22: mol_type = other RNA
tttatcagtctccaatcctcag

SEQ ID NO: 158263 - RNA, 22 nt, synthetic construct
  source 1..22: mol_type = other RNA
tttatcatgtcttcttggattt

SEQ ID NO: 158264 - RNA, 22 nt, synthetic construct
  source 1..22: mol_type = other RNA
tttatccttgcaccaactccac

SEQ ID NO: 158265 - RNA, 22 nt, synthetic construct
  source 1..22: mol_type = other RNA
tttatcggataaggaagagttt

SEQ ID NO: 158266 - RNA, 22 nt, synthetic construct
  source 1..22: mol_type = other RNA
tttatctacagaggattttgga

SEQ ID NO: 158267 - RNA, 22 nt, synthetic construct
  source 1..22: mol_type = other RNA
tttatctccacatttctacaca

SEQ ID NO: 158268 - RNA, 22 nt, synthetic construct
  source 1..22: mol_type = other RNA
tttatctccataagtccctaac

SEQ ID NO: 158269 - RNA, 22 nt, synthetic construct
  source 1..22: mol_type = other RNA
tttatctctctcaagcaatctg

SEQ ID NO: 158270 - RNA, 22 nt, synthetic construct
  source 1..22: mol_type = other RNA
tttatctggatttttgtgtaga

SEQ ID NO: 158271 - RNA, 22 nt, synthetic construct
  source 1..22: mol_type = other RNA
tttatctttggatatccccatt

SEQ ID NO: 158272 - RNA, 22 nt, synthetic construct
  source 1..22: mol_type = other RNA
tttatgaatgatgccatcacat

SEQ ID NO: 158273 - RNA, 22 nt, synthetic construct
  source 1..22: mol_type = other RNA
tttatgagacacacgagtattc

SEQ ID NO: 158274 - RNA, 22 nt, synthetic construct
  source 1..22: mol_type = other RNA
tttatgatttcacttacttgag

SEQ ID NO: 158275 - RNA, 22 nt, synthetic construct
  source 1..22: mol_type = other RNA
tttatgcatttggtctcattca

SEQ ID NO: 158276 - RNA, 22 nt, synthetic construct
  source 1..22: mol_type = other RNA
tttatgccaatatcacactgtt

SEQ ID NO: 158277 - RNA, 22 nt, synthetic construct
  source 1..22: mol_type = other RNA
tttatgctgatgaactacacag

SEQ ID NO: 158278 - RNA, 22 nt, synthetic construct
  source 1..22: mol_type = other RNA
tttatgctttgtctctggaagg

SEQ ID NO: 158279 - RNA, 22 nt, synthetic construct
  source 1..22: mol_type = other RNA
tttatggaaacatggtaatttg

SEQ ID NO: 158280 - RNA, 22 nt, synthetic construct
  source 1..22: mol_type = other RNA
tttatggaataatggaactaag

SEQ ID NO: 158281 - RNA, 22 nt, synthetic construct
  source 1..22: mol_type = other RNA
tttatggaattgccatatgtag

SEQ ID NO: 158282 - RNA, 22 nt, synthetic construct
  source 1..22: mol_type = other RNA
tttatggcctaagatggaaagt

SEQ ID NO: 158283 - RNA, 22 nt, synthetic construct
  source 1..22: mol_type = other RNA
tttatgggtcaaccactaaggt

SEQ ID NO: 158284 - RNA, 22 nt, synthetic construct
  source 1..22: mol_type = other RNA
tttatggtaactcctgttcttt

SEQ ID NO: 158285 - RNA, 22 nt, synthetic construct
  source 1..22: mol_type = other RNA
tttatggtaattggttcgtttg

SEQ ID NO: 158286 - RNA, 22 nt, synthetic construct
  source 1..22: mol_type = other RNA
tttatggttttttcccccctgg

SEQ ID NO: 158287 - RNA, 22 nt, synthetic construct
  source 1..22: mol_type = other RNA
tttatgtacacgtcttgtcaat

SEQ ID NO: 158288 - RNA, 22 nt, synthetic construct
  source 1..22: mol_type = other RNA
tttatgtacatgacctatctat

SEQ ID NO: 158289 - RNA, 22 nt, synthetic construct
  source 1..22: mol_type = other RNA
tttatgtgcagtctaaccatta

SEQ ID NO: 158290 - RNA, 22 nt, synthetic construct
  source 1..22: mol_type = other RNA
tttatgtgctttctcaacactg

SEQ ID NO: 158291 - RNA, 22 nt, synthetic construct
  source 1..22: mol_type = other RNA
tttatgttcatgaaccttcacc

SEQ ID NO: 158292 - RNA, 22 nt, synthetic construct
  source 1..22: mol_type = other RNA
tttatgttgcacaaaagtgaaa

SEQ ID NO: 158293 - RNA, 22 nt, synthetic construct
  source 1..22: mol_type = other RNA
tttattaaacctgttacatggt

SEQ ID NO: 158294 - RNA, 22 nt, synthetic construct
  source 1..22: mol_type = other RNA
tttattaaagtagaaggcccta

SEQ ID NO: 158295 - RNA, 22 nt, synthetic construct
  source 1..22: mol_type = other RNA
tttattaatttggcttggggaa

SEQ ID NO: 158296 - RNA, 22 nt, synthetic construct
  source 1..22: mol_type = other RNA
tttattagaactagaactgtgt

SEQ ID NO: 158297 - RNA, 22 nt, synthetic construct
  source 1..22: mol_type = other RNA
tttattagatagtggtttgaag

SEQ ID NO: 158298 - RNA, 22 nt, synthetic construct
  source 1..22: mol_type = other RNA
tttattaggtgcacacaacact

SEQ ID NO: 158299 - RNA, 22 nt, synthetic construct
  source 1..22: mol_type = other RNA
tttattagtagttaggtggttt

SEQ ID NO: 158300 - RNA, 22 nt, synthetic construct
  source 1..22: mol_type = other RNA
tttattcctctcttggaatgtg

SEQ ID NO: 158301 - RNA, 22 nt, synthetic construct
  source 1..22: mol_type = other RNA
tttattctgttctagctcctgg

SEQ ID NO: 158302 - RNA, 22 nt, synthetic construct
  source 1..22: mol_type = other RNA
tttattgataagcacatggtga

SEQ ID NO: 158303 - RNA, 22 nt, synthetic construct
  source 1..22: mol_type = other RNA
tttattgtcaaggtcatccttt

SEQ ID NO: 158304 - RNA, 22 nt, synthetic construct
  source 1..22: mol_type = other RNA
tttattgtttcacttttctggt

SEQ ID NO: 158305 - RNA, 22 nt, synthetic construct
  source 1..22: mol_type = other RNA
tttatttagcccatgtctaaag

SEQ ID NO: 158306 - RNA, 22 nt, synthetic construct
  source 1..22: mol_type = other RNA
tttatttaggccctctataatt

SEQ ID NO: 158307 - RNA, 22 nt, synthetic construct
  source 1..22: mol_type = other RNA
tttatttatacaggtgcttaca

SEQ ID NO: 158308 - RNA, 22 nt, synthetic construct
  source 1..22: mol_type = other RNA
tttatttatgctgatgaactac

SEQ ID NO: 158309 - RNA, 22 nt, synthetic construct
  source 1..22: mol_type = other RNA
tttatttccttaagccatttca

SEQ ID NO: 158310 - RNA, 22 nt, synthetic construct
  source 1..22: mol_type = other RNA
tttatttctgggctctctattc

SEQ ID NO: 158311 - RNA, 22 nt, synthetic construct
  source 1..22: mol_type = other RNA
tttatttcttctccctcttcgc

SEQ ID NO: 158312 - RNA, 22 nt, synthetic construct
  source 1..22: mol_type = other RNA
tttatttcttgacctcagtggt

SEQ ID NO: 158313 - RNA, 22 nt, synthetic construct
  source 1..22: mol_type = other RNA
tttatttgctgtcaggcaaggg

SEQ ID NO: 158314 - RNA, 22 nt, synthetic construct
  source 1..22: mol_type = other RNA
tttatttggctgttaccatttg

SEQ ID NO: 158315 - RNA, 22 nt, synthetic construct
  source 1..22: mol_type = other RNA
tttattttatgtacacgtcttg

SEQ ID NO: 158316 - RNA, 22 nt, synthetic construct
  source 1..22: mol_type = other RNA
tttattttctgcatttggtttg

SEQ ID NO: 158317 - RNA, 22 nt, synthetic construct
  source 1..22: mol_type = other RNA
tttatttttacccgtggaaata

SEQ ID NO: 158318 - RNA, 22 nt, synthetic construct
  source 1..22: mol_type = other RNA
tttatttttgagacaggttgtt

SEQ ID NO: 158319 - RNA, 22 nt, synthetic construct
  source 1..22: mol_type = other RNA
tttattttttcttcccatctca

SEQ ID NO: 158320 - RNA, 22 nt, synthetic construct
  source 1..22: mol_type = other RNA
tttcaaaaacagcatatacatg

SEQ ID NO: 158321 - RNA, 22 nt, synthetic construct
  source 1..22: mol_type = other RNA
tttcaaaaacccaactctttct

SEQ ID NO: 158322 - RNA, 22 nt, synthetic construct
  source 1..22: mol_type = other RNA
tttcaaaagctccccggatgat

SEQ ID NO: 158323 - RNA, 22 nt, synthetic construct
  source 1..22: mol_type = other RNA
tttcaaaccaatgttctctttt

SEQ ID NO: 158324 - RNA, 22 nt, synthetic construct
  source 1..22: mol_type = other RNA
tttcaaactgtggtcactgttt

SEQ ID NO: 158325 - RNA, 22 nt, synthetic construct
  source 1..22: mol_type = other RNA
tttcaaagagacctgattcttc

SEQ ID NO: 158326 - RNA, 22 nt, synthetic construct
  source 1..22: mol_type = other RNA
tttcaaagttaatagcctccta

SEQ ID NO: 158327 - RNA, 22 nt, synthetic construct
  source 1..22: mol_type = other RNA
tttcaaatacctagttttccaa

SEQ ID NO: 158328 - RNA, 22 nt, synthetic construct
  source 1..22: mol_type = other RNA
tttcaaatgtgacagaacaaac

SEQ ID NO: 158329 - RNA, 22 nt, synthetic construct
  source 1..22: mol_type = other RNA
tttcaacaaaggttgaaaactc

SEQ ID NO: 158330 - RNA, 22 nt, synthetic construct
  source 1..22: mol_type = other RNA
tttcaacctaacatgtcttggt

SEQ ID NO: 158331 - RNA, 22 nt, synthetic construct
  source 1..22: mol_type = other RNA
tttcaacctttgttgaaaacga

SEQ ID NO: 158332 - RNA, 22 nt, synthetic construct
  source 1..22: mol_type = other RNA
tttcaactgaacaacgctgtgg

SEQ ID NO: 158333 - RNA, 22 nt, synthetic construct
  source 1..22: mol_type = other RNA
tttcaaggcttgtgcatcagaa

SEQ ID NO: 158334 - RNA, 22 nt, synthetic construct
  source 1..22: mol_type = other RNA
tttcaaggggccttttgtcaag

SEQ ID NO: 158335 - RNA, 22 nt, synthetic construct
  source 1..22: mol_type = other RNA
tttcaagggtgttttcccccct

SEQ ID NO: 158336 - RNA, 22 nt, synthetic construct
  source 1..22: mol_type = other RNA
tttcaaggtagaagtacaaaca

SEQ ID NO: 158337 - RNA, 22 nt, synthetic construct
  source 1..22: mol_type = other RNA
tttcaaggtatctccccaaaga

SEQ ID NO: 158338 - RNA, 22 nt, synthetic construct
  source 1..22: mol_type = other RNA
tttcaagtaacactcagaagta

SEQ ID NO: 158339 - RNA, 22 nt, synthetic construct
  source 1..22: mol_type = other RNA
tttcaagtgaaccaaaaaccac

SEQ ID NO: 158340 - RNA, 22 nt, synthetic construct
  source 1..22: mol_type = other RNA
tttcaatagtgggtagaagcag

SEQ ID NO: 158341 - RNA, 22 nt, synthetic construct
  source 1..22: mol_type = other RNA
tttcaatattaagagtctcatc

SEQ ID NO: 158342 - RNA, 22 nt, synthetic construct
  source 1..22: mol_type = other RNA
tttcaatctggaatgcatcgtt

SEQ ID NO: 158343 - RNA, 22 nt, synthetic construct
  source 1..22: mol_type = other RNA
tttcaatcttggaaatgatacc

SEQ ID NO: 158344 - RNA, 22 nt, synthetic construct
  source 1..22: mol_type = other RNA
tttcacaaacacacaaaccaac

SEQ ID NO: 158345 - RNA, 22 nt, synthetic construct
  source 1..22: mol_type = other RNA
tttcacacgcattgcattgact

SEQ ID NO: 158346 - RNA, 22 nt, synthetic construct
  source 1..22: mol_type = other RNA
tttcacactataacagatggaa

SEQ ID NO: 158347 - RNA, 22 nt, synthetic construct
  source 1..22: mol_type = other RNA
tttcacactgattttctgcttc

SEQ ID NO: 158348 - RNA, 22 nt, synthetic construct
  source 1..22: mol_type = other RNA
tttcacagaaacagaaaaatcc

SEQ ID NO: 158349 - RNA, 22 nt, synthetic construct
  source 1..22: mol_type = other RNA
tttcacagacagtaatttatac

SEQ ID NO: 158350 - RNA, 22 nt, synthetic construct
  source 1..22: mol_type = other RNA
tttcacagggcagggagagaga

SEQ ID NO: 158351 - RNA, 22 nt, synthetic construct
  source 1..22: mol_type = other RNA
tttcacataaatttgccacatt

SEQ ID NO: 158352 - RNA, 22 nt, synthetic construct
  source 1..22: mol_type = other RNA
tttcacataaggtatatttctg

SEQ ID NO: 158353 - RNA, 22 nt, synthetic construct
  source 1..22: mol_type = other RNA
tttcacattcttcaccattcca

SEQ ID NO: 158354 - RNA, 22 nt, synthetic construct
  source 1..22: mol_type = other RNA
tttcacattgcacagtctcccc

SEQ ID NO: 158355 - RNA, 22 nt, synthetic construct
  source 1..22: mol_type = other RNA
tttcaccagcggcatacaggag

SEQ ID NO: 158356 - RNA, 22 nt, synthetic construct
  source 1..22: mol_type = other RNA
tttcaccctgcgaaggcaatgt

SEQ ID NO: 158357 - RNA, 22 nt, synthetic construct
  source 1..22: mol_type = other RNA
tttcactctaatatggttccta

SEQ ID NO: 158358 - RNA, 22 nt, synthetic construct
  source 1..22: mol_type = other RNA
tttcactctcaatagtgtcctt

SEQ ID NO: 158359 - RNA, 22 nt, synthetic construct
  source 1..22: mol_type = other RNA
tttcactctgtcgcccaggctg

SEQ ID NO: 158360 - RNA, 22 nt, synthetic construct
  source 1..22: mol_type = other RNA
tttcactcttagtgatgtcttt

SEQ ID NO: 158361 - RNA, 22 nt, synthetic construct
  source 1..22: mol_type = other RNA
tttcactcttttaaggtttaga

SEQ ID NO: 158362 - RNA, 22 nt, synthetic construct
  source 1..22: mol_type = other RNA
tttcactgctcagtccctcacc

SEQ ID NO: 158363 - RNA, 22 nt, synthetic construct
  source 1..22: mol_type = other RNA
tttcacttacttgagccccaga

SEQ ID NO: 158364 - RNA, 22 nt, synthetic construct
  source 1..22: mol_type = other RNA
tttcacttcgttcagtttagta

SEQ ID NO: 158365 - RNA, 22 nt, synthetic construct
  source 1..22: mol_type = other RNA
tttcacttcttagtaaatatcc

SEQ ID NO: 158366 - RNA, 22 nt, synthetic construct
  source 1..22: mol_type = other RNA
tttcacttcttattggttatct

SEQ ID NO: 158367 - RNA, 22 nt, synthetic construct
  source 1..22: mol_type = other RNA
tttcacttgattactttacagt

SEQ ID NO: 158368 - RNA, 22 nt, synthetic construct
  source 1..22: mol_type = other RNA
tttcacttgtttcttttcactc

SEQ ID NO: 158369 - RNA, 22 nt, synthetic construct
  source 1..22: mol_type = other RNA
tttcactttgatcatacacatc

SEQ ID NO: 158370 - RNA, 22 nt, synthetic construct
  source 1..22: mol_type = other RNA
tttcacttttctggttttctgg

SEQ ID NO: 158371 - RNA, 22 nt, synthetic construct
  source 1..22: mol_type = other RNA
tttcacttttgtgcaacataaa

SEQ ID NO: 158372 - RNA, 22 nt, synthetic construct
  source 1..22: mol_type = other RNA
tttcagaaagagaatagcagaa

SEQ ID NO: 158373 - RNA, 22 nt, synthetic construct
  source 1..22: mol_type = other RNA
tttcagacttaactataggagt

SEQ ID NO: 158374 - RNA, 22 nt, synthetic construct
  source 1..22: mol_type = other RNA
tttcagagagacctgaagactg

SEQ ID NO: 158375 - RNA, 22 nt, synthetic construct
  source 1..22: mol_type = other RNA
tttcagatctctgacattggtt

SEQ ID NO: 158376 - RNA, 22 nt, synthetic construct
  source 1..22: mol_type = other RNA
tttcagattgaccttgtatcca

SEQ ID NO: 158377 - RNA, 22 nt, synthetic construct
  source 1..22: mol_type = other RNA
tttcagattgcttgagagagat

SEQ ID NO: 158378 - RNA, 22 nt, synthetic construct
  source 1..22: mol_type = other RNA
tttcagcacaatactgtctcag

SEQ ID NO: 158379 - RNA, 22 nt, synthetic construct
  source 1..22: mol_type = other RNA
tttcagcactgctattgataaa

SEQ ID NO: 158380 - RNA, 22 nt, synthetic construct
  source 1..22: mol_type = other RNA
tttcagcagcagagaagtgaag

SEQ ID NO: 158381 - RNA, 22 nt, synthetic construct
  source 1..22: mol_type = other RNA
tttcagcatagcagaaccttag

SEQ ID NO: 158382 - RNA, 22 nt, synthetic construct
  source 1..22: mol_type = other RNA
tttcagccaaagctggcatgtt

SEQ ID NO: 158383 - RNA, 22 nt, synthetic construct
  source 1..22: mol_type = other RNA
tttcagccatcccagctacata

SEQ ID NO: 158384 - RNA, 22 nt, synthetic construct
  source 1..22: mol_type = other RNA
tttcagccctgatagatattgg

SEQ ID NO: 158385 - RNA, 22 nt, synthetic construct
  source 1..22: mol_type = other RNA
tttcagctcaaacagcttgaca

SEQ ID NO: 158386 - RNA, 22 nt, synthetic construct
  source 1..22: mol_type = other RNA
tttcaggaatgcaaagtttcct

SEQ ID NO: 158387 - RNA, 22 nt, synthetic construct
  source 1..22: mol_type = other RNA
tttcaggactcatgagagctgt

SEQ ID NO: 158388 - RNA, 22 nt, synthetic construct
  source 1..22: mol_type = other RNA
tttcagggagaattggtagtca

SEQ ID NO: 158389 - RNA, 22 nt, synthetic construct
  source 1..22: mol_type = other RNA
tttcaggggggccactggaaac

SEQ ID NO: 158390 - RNA, 22 nt, synthetic construct
  source 1..22: mol_type = other RNA
tttcaggtattgagcctgttcc

SEQ ID NO: 158391 - RNA, 22 nt, synthetic construct
  source 1..22: mol_type = other RNA
tttcaggtggtatttaatctgt

SEQ ID NO: 158392 - RNA, 22 nt, synthetic construct
  source 1..22: mol_type = other RNA
tttcaggtgtgtaaacactgtt

SEQ ID NO: 158393 - RNA, 22 nt, synthetic construct
  source 1..22: mol_type = other RNA
tttcaggttcaagcgactctcc

SEQ ID NO: 158394 - RNA, 22 nt, synthetic construct
  source 1..22: mol_type = other RNA
tttcaggttttcgaccaagtta

SEQ ID NO: 158395 - RNA, 22 nt, synthetic construct
  source 1..22: mol_type = other RNA
tttcagtaaatgaaatttgagg

SEQ ID NO: 158396 - RNA, 22 nt, synthetic construct
  source 1..22: mol_type = other RNA
tttcagtacacgaaaatatccc

SEQ ID NO: 158397 - RNA, 22 nt, synthetic construct
  source 1..22: mol_type = other RNA
tttcagtatgtgtctctgacat

SEQ ID NO: 158398 - RNA, 22 nt, synthetic construct
  source 1..22: mol_type = other RNA
tttcagtccagatattatcctc

SEQ ID NO: 158399 - RNA, 22 nt, synthetic construct
  source 1..22: mol_type = other RNA
tttcagtccctcctttctagaa

SEQ ID NO: 158400 - RNA, 22 nt, synthetic construct
  source 1..22: mol_type = other RNA
tttcagtcggttcttcaccgtg

SEQ ID NO: 158401 - RNA, 22 nt, synthetic construct
  source 1..22: mol_type = other RNA
tttcagtgagtagggaaggtgc

SEQ ID NO: 158402 - RNA, 22 nt, synthetic construct
  source 1..22: mol_type = other RNA
tttcagtgtgtccacacaatgg

SEQ ID NO: 158403 - RNA, 22 nt, synthetic construct
  source 1..22: mol_type = other RNA
tttcagttaaaagttttccaac

SEQ ID NO: 158404 - RNA, 22 nt, synthetic construct
  source 1..22: mol_type = other RNA
tttcagttctttcggatattta

SEQ ID NO: 158405 - RNA, 22 nt, synthetic construct
  source 1..22: mol_type = other RNA
tttcagttgcatgaatttgttt

SEQ ID NO: 158406 - RNA, 22 nt, synthetic construct
  source 1..22: mol_type = other RNA
tttcataaaatgatggcaacaa

SEQ ID NO: 158407 - RNA, 22 nt, synthetic construct
  source 1..22: mol_type = other RNA
tttcataacaaagctctgatgc

SEQ ID NO: 158408 - RNA, 22 nt, synthetic construct
  source 1..22: mol_type = other RNA
tttcatagcagaatggccctgc

SEQ ID NO: 158409 - RNA, 22 nt, synthetic construct
  source 1..22: mol_type = other RNA
tttcatagcagcattgtttaca

SEQ ID NO: 158410 - RNA, 22 nt, synthetic construct
  source 1..22: mol_type = other RNA
tttcataggaaatacttgatct

SEQ ID NO: 158411 - RNA, 22 nt, synthetic construct
  source 1..22: mol_type = other RNA
tttcataggcatctctcccttc

SEQ ID NO: 158412 - RNA, 22 nt, synthetic construct
  source 1..22: mol_type = other RNA
tttcatagtcatcattattagc

SEQ ID NO: 158413 - RNA, 22 nt, synthetic construct
  source 1..22: mol_type = other RNA
tttcatatctgattttgtgtct

SEQ ID NO: 158414 - RNA, 22 nt, synthetic construct
  source 1..22: mol_type = other RNA
tttcatcactcactggcctgag

SEQ ID NO: 158415 - RNA, 22 nt, synthetic construct
  source 1..22: mol_type = other RNA
tttcatccaaacagaaaccctg

SEQ ID NO: 158416 - RNA, 22 nt, synthetic construct
  source 1..22: mol_type = other RNA
tttcatcgtaaaaagccattta

SEQ ID NO: 158417 - RNA, 22 nt, synthetic construct
  source 1..22: mol_type = other RNA
tttcatctatgtcccctggggc

SEQ ID NO: 158418 - RNA, 22 nt, synthetic construct
  source 1..22: mol_type = other RNA
tttcatgaacaattttctctca

SEQ ID NO: 158419 - RNA, 22 nt, synthetic construct
  source 1..22: mol_type = other RNA
tttcatgatttggtgtgtgcaa

SEQ ID NO: 158420 - RNA, 22 nt, synthetic construct
  source 1..22: mol_type = other RNA
tttcatgccatcctggatttgg

SEQ ID NO: 158421 - RNA, 22 nt, synthetic construct
  source 1..22: mol_type = other RNA
tttcatgcctttcagcatagca

SEQ ID NO: 158422 - RNA, 22 nt, synthetic construct
  source 1..22: mol_type = other RNA
tttcatgcgacatatcagggat

SEQ ID NO: 158423 - RNA, 22 nt, synthetic construct
  source 1..22: mol_type = other RNA
tttcatggacttcctattttat

SEQ ID NO: 158424 - RNA, 22 nt, synthetic construct
  source 1..22: mol_type = other RNA
tttcatgggttgatttttaatg

SEQ ID NO: 158425 - RNA, 22 nt, synthetic construct
  source 1..22: mol_type = other RNA
tttcatggtatcaattgtaatg

SEQ ID NO: 158426 - RNA, 22 nt, synthetic construct
  source 1..22: mol_type = other RNA
tttcatggttttaatgggcatt

SEQ ID NO: 158427 - RNA, 22 nt, synthetic construct
  source 1..22: mol_type = other RNA
tttcattacatttgcttaggct

SEQ ID NO: 158428 - RNA, 22 nt, synthetic construct
  source 1..22: mol_type = other RNA
tttcattaggttgatggctgta

SEQ ID NO: 158429 - RNA, 22 nt, synthetic construct
  source 1..22: mol_type = other RNA
tttcattcatatttgttcaagc

SEQ ID NO: 158430 - RNA, 22 nt, synthetic construct
  source 1..22: mol_type = other RNA
tttcattcgttcaaaacatcat

SEQ ID NO: 158431 - RNA, 22 nt, synthetic construct
  source 1..22: mol_type = other RNA
tttcattctacctggagcctga

SEQ ID NO: 158432 - RNA, 22 nt, synthetic construct
  source 1..22: mol_type = other RNA
tttcatttacaaaaacacactg

SEQ ID NO: 158433 - RNA, 22 nt, synthetic construct
  source 1..22: mol_type = other RNA
tttcatttactgaaatcctagc

SEQ ID NO: 158434 - RNA, 22 nt, synthetic construct
  source 1..22: mol_type = other RNA
tttcatttggcctctgcggcgg

SEQ ID NO: 158435 - RNA, 22 nt, synthetic construct
  source 1..22: mol_type = other RNA
tttcatttgtaattcatcctac

SEQ ID NO: 158436 - RNA, 22 nt, synthetic construct
  source 1..22: mol_type = other RNA
tttcattttactgctatacaac

SEQ ID NO: 158437 - RNA, 22 nt, synthetic construct
  source 1..22: mol_type = other RNA
tttccaaagatcatgggtttta

SEQ ID NO: 158438 - RNA, 22 nt, synthetic construct
  source 1..22: mol_type = other RNA
tttccaaattcaaagcaagtta

SEQ ID NO: 158439 - RNA, 22 nt, synthetic construct
  source 1..22: mol_type = other RNA
tttccaacagtttacacgcctt

SEQ ID NO: 158440 - RNA, 22 nt, synthetic construct
  source 1..22: mol_type = other RNA
tttccaaccaagcccaactttt

SEQ ID NO: 158441 - RNA, 22 nt, synthetic construct
  source 1..22: mol_type = other RNA
tttccaaccactgaatcagatt

SEQ ID NO: 158442 - RNA, 22 nt, synthetic construct
  source 1..22: mol_type = other RNA
tttccaagaaccctttgttatc

SEQ ID NO: 158443 - RNA, 22 nt, synthetic construct
  source 1..22: mol_type = other RNA
tttccaagattgaaaatggttt

SEQ ID NO: 158444 - RNA, 22 nt, synthetic construct
  source 1..22: mol_type = other RNA
tttccaagccttaaaagtgctg

SEQ ID NO: 158445 - RNA, 22 nt, synthetic construct
  source 1..22: mol_type = other RNA
tttccaatccgggaacatgaca

SEQ ID NO: 158446 - RNA, 22 nt, synthetic construct
  source 1..22: mol_type = other RNA
tttccacagtgactttactgtt

SEQ ID NO: 158447 - RNA, 22 nt, synthetic construct
  source 1..22: mol_type = other RNA
tttccacataaagtcttgctgg

SEQ ID NO: 158448 - RNA, 22 nt, synthetic construct
  source 1..22: mol_type = other RNA
tttccacataattgaacccact

SEQ ID NO: 158449 - RNA, 22 nt, synthetic construct
  source 1..22: mol_type = other RNA
tttccacccatgaagccagcat

SEQ ID NO: 158450 - RNA, 22 nt, synthetic construct
  source 1..22: mol_type = other RNA
tttccacgggtaaaaataaatc

SEQ ID NO: 158451 - RNA, 22 nt, synthetic construct
  source 1..22: mol_type = other RNA
tttccactaatgtccttttcct

SEQ ID NO: 158452 - RNA, 22 nt, synthetic construct
  source 1..22: mol_type = other RNA
tttccactctctggctgcaatt

SEQ ID NO: 158453 - RNA, 22 nt, synthetic construct
  source 1..22: mol_type = other RNA
tttccactttgaggttattaag

SEQ ID NO: 158454 - RNA, 22 nt, synthetic construct
  source 1..22: mol_type = other RNA
tttccagaaaactggcaatcaa

SEQ ID NO: 158455 - RNA, 22 nt, synthetic construct
  source 1..22: mol_type = other RNA
tttccagaagtaactcttgagt

SEQ ID NO: 158456 - RNA, 22 nt, synthetic construct
  source 1..22: mol_type = other RNA
tttccagaggttcttttaaatg

SEQ ID NO: 158457 - RNA, 22 nt, synthetic construct
  source 1..22: mol_type = other RNA
tttccagcattttataggcatt

SEQ ID NO: 158458 - RNA, 22 nt, synthetic construct
  source 1..22: mol_type = other RNA
tttccagcctttaatttagcgt

SEQ ID NO: 158459 - RNA, 22 nt, synthetic construct
  source 1..22: mol_type = other RNA
tttccaggaaaagcaaatgtca

SEQ ID NO: 158460 - RNA, 22 nt, synthetic construct
  source 1..22: mol_type = other RNA
tttccaggaccaatttaccatc

SEQ ID NO: 158461 - RNA, 22 nt, synthetic construct
  source 1..22: mol_type = other RNA
tttccagggggtatggagacac

SEQ ID NO: 158462 - RNA, 22 nt, synthetic construct
  source 1..22: mol_type = other RNA
tttccaggtcattacatatttt

SEQ ID NO: 158463 - RNA, 22 nt, synthetic construct
  source 1..22: mol_type = other RNA
tttccagtactttttcatccaa

SEQ ID NO: 158464 - RNA, 22 nt, synthetic construct
  source 1..22: mol_type = other RNA
tttccagtatattcatagtagc

SEQ ID NO: 158465 - RNA, 22 nt, synthetic construct
  source 1..22: mol_type = other RNA
tttccagtcttctcatacagat

SEQ ID NO: 158466 - RNA, 22 nt, synthetic construct
  source 1..22: mol_type = other RNA
tttccagtggcccccctgaaaa

SEQ ID NO: 158467 - RNA, 22 nt, synthetic construct
  source 1..22: mol_type = other RNA
tttccagtgtttggtttttatg

SEQ ID NO: 158468 - RNA, 22 nt, synthetic construct
  source 1..22: mol_type = other RNA
tttccataaaaagcgttggaga

SEQ ID NO: 158469 - RNA, 22 nt, synthetic construct
  source 1..22: mol_type = other RNA
tttccatcttaggccataaatc

SEQ ID NO: 158470 - RNA, 22 nt, synthetic construct
  source 1..22: mol_type = other RNA
tttccatggaggggccagttga

SEQ ID NO: 158471 - RNA, 22 nt, synthetic construct
  source 1..22: mol_type = other RNA
tttccatgtcttggctattgtc

SEQ ID NO: 158472 - RNA, 22 nt, synthetic construct
  source 1..22: mol_type = other RNA
tttccattcaatccttgtaact

SEQ ID NO: 158473 - RNA, 22 nt, synthetic construct
  source 1..22: mol_type = other RNA
tttccattcacacaccctttct

SEQ ID NO: 158474 - RNA, 22 nt, synthetic construct
  source 1..22: mol_type = other RNA
tttccattcatgtaatgcaaac

SEQ ID NO: 158475 - RNA, 22 nt, synthetic construct
  source 1..22: mol_type = other RNA
tttcccaaagatagactcttca

SEQ ID NO: 158476 - RNA, 22 nt, synthetic construct
  source 1..22: mol_type = other RNA
tttcccaatctctggtattctg

SEQ ID NO: 158477 - RNA, 22 nt, synthetic construct
  source 1..22: mol_type = other RNA
tttcccagatacgttaaaggaa

SEQ ID NO: 158478 - RNA, 22 nt, synthetic construct
  source 1..22: mol_type = other RNA
tttcccaggagctagaacagaa

SEQ ID NO: 158479 - RNA, 22 nt, synthetic construct
  source 1..22: mol_type = other RNA
tttcccagggtgtagccacaag

SEQ ID NO: 158480 - RNA, 22 nt, synthetic construct
  source 1..22: mol_type = other RNA
tttcccatctctagttttccag

SEQ ID NO: 158481 - RNA, 22 nt, synthetic construct
  source 1..22: mol_type = other RNA
tttcccattaccaaaacctggt

SEQ ID NO: 158482 - RNA, 22 nt, synthetic construct
  source 1..22: mol_type = other RNA
tttcccatttgatttcttcttt

SEQ ID NO: 158483 - RNA, 22 nt, synthetic construct
  source 1..22: mol_type = other RNA
tttccccattagagtaagcaac

SEQ ID NO: 158484 - RNA, 22 nt, synthetic construct
  source 1..22: mol_type = other RNA
tttcccccaattaaactataga

SEQ ID NO: 158485 - RNA, 22 nt, synthetic construct
  source 1..22: mol_type = other RNA
tttcccccctaaaacactggaa

SEQ ID NO: 158486 - RNA, 22 nt, synthetic construct
  source 1..22: mol_type = other RNA
tttcccccctggaacaatcaaa

SEQ ID NO: 158487 - RNA, 22 nt, synthetic construct
  source 1..22: mol_type = other RNA
tttccccctacacccagttcac

SEQ ID NO: 158488 - RNA, 22 nt, synthetic construct
  source 1..22: mol_type = other RNA
tttcccgctacacaagtattaa

SEQ ID NO: 158489 - RNA, 22 nt, synthetic construct
  source 1..22: mol_type = other RNA
tttccctcagaatttgaggtct

SEQ ID NO: 158490 - RNA, 22 nt, synthetic construct
  source 1..22: mol_type = other RNA
tttccctcctttttatcaccct

SEQ ID NO: 158491 - RNA, 22 nt, synthetic construct
  source 1..22: mol_type = other RNA
tttccctctgagagaagtcaga

SEQ ID NO: 158492 - RNA, 22 nt, synthetic construct
  source 1..22: mol_type = other RNA
tttccctgcatacactcatttc

SEQ ID NO: 158493 - RNA, 22 nt, synthetic construct
  source 1..22: mol_type = other RNA
tttccctgcttcatctggacca

SEQ ID NO: 158494 - RNA, 22 nt, synthetic construct
  source 1..22: mol_type = other RNA
tttccctggggaataagatttt

SEQ ID NO: 158495 - RNA, 22 nt, synthetic construct
  source 1..22: mol_type = other RNA
tttccctgtgtatgtgtagtca

SEQ ID NO: 158496 - RNA, 22 nt, synthetic construct
  source 1..22: mol_type = other RNA
tttcccttaaaaggaactaatt

SEQ ID NO: 158497 - RNA, 22 nt, synthetic construct
  source 1..22: mol_type = other RNA
tttcccttaatgttgacatctt

SEQ ID NO: 158498 - RNA, 22 nt, synthetic construct
  source 1..22: mol_type = other RNA
tttcccttctgctcggctctgt

SEQ ID NO: 158499 - RNA, 22 nt, synthetic construct
  source 1..22: mol_type = other RNA
tttcccttttggatgcagattt

SEQ ID NO: 158500 - RNA, 22 nt, synthetic construct
  source 1..22: mol_type = other RNA
tttcccttttgtagctaatatc

SEQ ID NO: 158501 - RNA, 22 nt, synthetic construct
  source 1..22: mol_type = other RNA
tttccgatgataccttcttgag

SEQ ID NO: 158502 - RNA, 22 nt, synthetic construct
  source 1..22: mol_type = other RNA
tttccggttgtatagcagtaaa

SEQ ID NO: 158503 - RNA, 22 nt, synthetic construct
  source 1..22: mol_type = other RNA
tttccgtatccagtggtttttt

SEQ ID NO: 158504 - RNA, 22 nt, synthetic construct
  source 1..22: mol_type = other RNA
tttccgtctagccacttcctat

SEQ ID NO: 158505 - RNA, 22 nt, synthetic construct
  source 1..22: mol_type = other RNA
tttccgtgtgacaaaaagtagg

SEQ ID NO: 158506 - RNA, 22 nt, synthetic construct
  source 1..22: mol_type = other RNA
tttccgttgctgcatagtactc

SEQ ID NO: 158507 - RNA, 22 nt, synthetic construct
  source 1..22: mol_type = other RNA
tttccgttttgcaagatgcata

SEQ ID NO: 158508 - RNA, 22 nt, synthetic construct
  source 1..22: mol_type = other RNA
tttcctaaaactccccatgcag

SEQ ID NO: 158509 - RNA, 22 nt, synthetic construct
  source 1..22: mol_type = other RNA
tttcctaaccactgttatctgg

SEQ ID NO: 158510 - RNA, 22 nt, synthetic construct
  source 1..22: mol_type = other RNA
tttcctaatctaacatgttaca

SEQ ID NO: 158511 - RNA, 22 nt, synthetic construct
  source 1..22: mol_type = other RNA
tttcctacatactgcactctca

SEQ ID NO: 158512 - RNA, 22 nt, synthetic construct
  source 1..22: mol_type = other RNA
tttcctaccctgaggatataac

SEQ ID NO: 158513 - RNA, 22 nt, synthetic construct
  source 1..22: mol_type = other RNA
tttcctactaacaagaaagggt

SEQ ID NO: 158514 - RNA, 22 nt, synthetic construct
  source 1..22: mol_type = other RNA
tttcctagactgccaggtaggg

SEQ ID NO: 158515 - RNA, 22 nt, synthetic construct
  source 1..22: mol_type = other RNA
tttcctagattccctctggcct

SEQ ID NO: 158516 - RNA, 22 nt, synthetic construct
  source 1..22: mol_type = other RNA
tttcctatgaaaatttagcttc

SEQ ID NO: 158517 - RNA, 22 nt, synthetic construct
  source 1..22: mol_type = other RNA
tttcctattcacactgctcctg

SEQ ID NO: 158518 - RNA, 22 nt, synthetic construct
  source 1..22: mol_type = other RNA
tttcctcatgtccatagttaat

SEQ ID NO: 158519 - RNA, 22 nt, synthetic construct
  source 1..22: mol_type = other RNA
tttcctcccttcagcctgtgtc

SEQ ID NO: 158520 - RNA, 22 nt, synthetic construct
  source 1..22: mol_type = other RNA
tttcctccttctgctcactttg

SEQ ID NO: 158521 - RNA, 22 nt, synthetic construct
  source 1..22: mol_type = other RNA
tttcctcggtctacggacgcag

SEQ ID NO: 158522 - RNA, 22 nt, synthetic construct
  source 1..22: mol_type = other RNA
tttcctcgttttcaacaaaggt

SEQ ID NO: 158523 - RNA, 22 nt, synthetic construct
  source 1..22: mol_type = other RNA
tttcctgataaggggctatctt

SEQ ID NO: 158524 - RNA, 22 nt, synthetic construct
  source 1..22: mol_type = other RNA
tttcctgatcacaccctcctac

SEQ ID NO: 158525 - RNA, 22 nt, synthetic construct
  source 1..22: mol_type = other RNA
tttcctgatcagcaccctcaaa

SEQ ID NO: 158526 - RNA, 22 nt, synthetic construct
  source 1..22: mol_type = other RNA
tttcctgatggacattctgctt

SEQ ID NO: 158527 - RNA, 22 nt, synthetic construct
  source 1..22: mol_type = other RNA
tttcctgcacatgcacaaggtc

SEQ ID NO: 158528 - RNA, 22 nt, synthetic construct
  source 1..22: mol_type = other RNA
tttcctgcccctccactccaca

SEQ ID NO: 158529 - RNA, 22 nt, synthetic construct
  source 1..22: mol_type = other RNA
tttcctgctgtcgtttatgcat

SEQ ID NO: 158530 - RNA, 22 nt, synthetic construct
  source 1..22: mol_type = other RNA
tttcctggaaaacttctctgga

SEQ ID NO: 158531 - RNA, 22 nt, synthetic construct
  source 1..22: mol_type = other RNA
tttcctgtgatttatgtggcat

SEQ ID NO: 158532 - RNA, 22 nt, synthetic construct
  source 1..22: mol_type = other RNA
tttcctgttccgggatcctgtc

SEQ ID NO: 158533 - RNA, 22 nt, synthetic construct
  source 1..22: mol_type = other RNA
tttccttaagcacagactgtgc

SEQ ID NO: 158534 - RNA, 22 nt, synthetic construct
  source 1..22: mol_type = other RNA
tttccttaagccatttcaggtt

SEQ ID NO: 158535 - RNA, 22 nt, synthetic construct
  source 1..22: mol_type = other RNA
tttccttaccagtgcttgcagc

SEQ ID NO: 158536 - RNA, 22 nt, synthetic construct
  source 1..22: mol_type = other RNA
tttccttacctttatctttgga

SEQ ID NO: 158537 - RNA, 22 nt, synthetic construct
  source 1..22: mol_type = other RNA
tttccttagttcgaagtttttt

SEQ ID NO: 158538 - RNA, 22 nt, synthetic construct
  source 1..22: mol_type = other RNA
tttccttatagtattacctccc

SEQ ID NO: 158539 - RNA, 22 nt, synthetic construct
  source 1..22: mol_type = other RNA
tttccttatccattcatctctc

SEQ ID NO: 158540 - RNA, 22 nt, synthetic construct
  source 1..22: mol_type = other RNA
tttccttatggatatctggcct

SEQ ID NO: 158541 - RNA, 22 nt, synthetic construct
  source 1..22: mol_type = other RNA
tttccttattgagaagcagaaa

SEQ ID NO: 158542 - RNA, 22 nt, synthetic construct
  source 1..22: mol_type = other RNA
tttccttccagatgttttacac

SEQ ID NO: 158543 - RNA, 22 nt, synthetic construct
  source 1..22: mol_type = other RNA
tttccttccagtttatatgcct

SEQ ID NO: 158544 - RNA, 22 nt, synthetic construct
  source 1..22: mol_type = other RNA
tttccttccttgctcaggagta

SEQ ID NO: 158545 - RNA, 22 nt, synthetic construct
  source 1..22: mol_type = other RNA
tttccttcttaagacatttggg

SEQ ID NO: 158546 - RNA, 22 nt, synthetic construct
  source 1..22: mol_type = other RNA
tttccttctttgggggaagcag

SEQ ID NO: 158547 - RNA, 22 nt, synthetic construct
  source 1..22: mol_type = other RNA
tttccttggagaagagttctga

SEQ ID NO: 158548 - RNA, 22 nt, synthetic construct
  source 1..22: mol_type = other RNA
tttccttgtcctaaaattcctt

SEQ ID NO: 158549 - RNA, 22 nt, synthetic construct
  source 1..22: mol_type = other RNA
tttcctttaacgtatctgggaa

SEQ ID NO: 158550 - RNA, 22 nt, synthetic construct
  source 1..22: mol_type = other RNA
tttcctttcagtcggttcttca

SEQ ID NO: 158551 - RNA, 22 nt, synthetic construct
  source 1..22: mol_type = other RNA
tttcctttgcctaagtctcagg

SEQ ID NO: 158552 - RNA, 22 nt, synthetic construct
  source 1..22: mol_type = other RNA
tttcctttgcctttcactttga

SEQ ID NO: 158553 - RNA, 22 nt, synthetic construct
  source 1..22: mol_type = other RNA
tttcgaagtgggaagcaaagga

SEQ ID NO: 158554 - RNA, 22 nt, synthetic construct
  source 1..22: mol_type = other RNA
tttcgaattatgctaacatgaa

SEQ ID NO: 158555 - RNA, 22 nt, synthetic construct
  source 1..22: mol_type = other RNA
tttcgaccaagttactagaagc

SEQ ID NO: 158556 - RNA, 22 nt, synthetic construct
  source 1..22: mol_type = other RNA
tttcgagactgagtaatattcc

SEQ ID NO: 158557 - RNA, 22 nt, synthetic construct
  source 1..22: mol_type = other RNA
tttcgcaaagcaacatgctaag

SEQ ID NO: 158558 - RNA, 22 nt, synthetic construct
  source 1..22: mol_type = other RNA
tttcgcaaagtaaaaagcacta

SEQ ID NO: 158559 - RNA, 22 nt, synthetic construct
  source 1..22: mol_type = other RNA
tttcgcatcattcaaatgatat

SEQ ID NO: 158560 - RNA, 22 nt, synthetic construct
  source 1..22: mol_type = other RNA
tttcgcctagataagaaaatgt

SEQ ID NO: 158561 - RNA, 22 nt, synthetic construct
  source 1..22: mol_type = other RNA
tttcgccttctcagaaggacac

SEQ ID NO: 158562 - RNA, 22 nt, synthetic construct
  source 1..22: mol_type = other RNA
tttcgctaatctcaatcagggc

SEQ ID NO: 158563 - RNA, 22 nt, synthetic construct
  source 1..22: mol_type = other RNA
tttcgctatcagtagtttgcta

SEQ ID NO: 158564 - RNA, 22 nt, synthetic construct
  source 1..22: mol_type = other RNA
tttcgcttttggagctataatt

SEQ ID NO: 158565 - RNA, 22 nt, synthetic construct
  source 1..22: mol_type = other RNA
tttcggatatttactaagaagt

SEQ ID NO: 158566 - RNA, 22 nt, synthetic construct
  source 1..22: mol_type = other RNA
tttcggctctgtgctgagatgg

SEQ ID NO: 158567 - RNA, 22 nt, synthetic construct
  source 1..22: mol_type = other RNA
tttcgtatcttttaacagatgg

SEQ ID NO: 158568 - RNA, 22 nt, synthetic construct
  source 1..22: mol_type = other RNA
tttcgtatggaagatgggactt

SEQ ID NO: 158569 - RNA, 22 nt, synthetic construct
  source 1..22: mol_type = other RNA
tttcgtcatctataaggtaatg

SEQ ID NO: 158570 - RNA, 22 nt, synthetic construct
  source 1..22: mol_type = other RNA
tttcgtgagggtttcagtgagt

SEQ ID NO: 158571 - RNA, 22 nt, synthetic construct
  source 1..22: mol_type = other RNA
tttcgtgtactgaaaccagtgc

SEQ ID NO: 158572 - RNA, 22 nt, synthetic construct
  source 1..22: mol_type = other RNA
tttctaaaaacgtgcaaactac

SEQ ID NO: 158573 - RNA, 22 nt, synthetic construct
  source 1..22: mol_type = other RNA
tttctaaaccttaaaagagtga

SEQ ID NO: 158574 - RNA, 22 nt, synthetic construct
  source 1..22: mol_type = other RNA
tttctaaactggttttcctgat

SEQ ID NO: 158575 - RNA, 22 nt, synthetic construct
  source 1..22: mol_type = other RNA
tttctaaatcaacagtgtacta

SEQ ID NO: 158576 - RNA, 22 nt, synthetic construct
  source 1..22: mol_type = other RNA
tttctaaattgaacagcctaaa

SEQ ID NO: 158577 - RNA, 22 nt, synthetic construct
  source 1..22: mol_type = other RNA
tttctaagagccaaagacattg

SEQ ID NO: 158578 - RNA, 22 nt, synthetic construct
  source 1..22: mol_type = other RNA
tttctaagccatgtttctcctg

SEQ ID NO: 158579 - RNA, 22 nt, synthetic construct
  source 1..22: mol_type = other RNA
tttctaaggttctgctatgctg

SEQ ID NO: 158580 - RNA, 22 nt, synthetic construct
  source 1..22: mol_type = other RNA
tttctaatcctttgcacacacc

SEQ ID NO: 158581 - RNA, 22 nt, synthetic construct
  source 1..22: mol_type = other RNA
tttctaattctgacaactggga

SEQ ID NO: 158582 - RNA, 22 nt, synthetic construct
  source 1..22: mol_type = other RNA
tttctaatttccaagaaccctt

SEQ ID NO: 158583 - RNA, 22 nt, synthetic construct
  source 1..22: mol_type = other RNA
tttctacctttggctactgtaa

SEQ ID NO: 158584 - RNA, 22 nt, synthetic construct
  source 1..22: mol_type = other RNA
tttctactagtataagagaagg

SEQ ID NO: 158585 - RNA, 22 nt, synthetic construct
  source 1..22: mol_type = other RNA
tttctactggggtcttagttct

SEQ ID NO: 158586 - RNA, 22 nt, synthetic construct
  source 1..22: mol_type = other RNA
tttctagaatgcatccctcctc

SEQ ID NO: 158587 - RNA, 22 nt, synthetic construct
  source 1..22: mol_type = other RNA
tttctagattcatatgctttga

SEQ ID NO: 158588 - RNA, 22 nt, synthetic construct
  source 1..22: mol_type = other RNA
tttctagccataatccttagat

SEQ ID NO: 158589 - RNA, 22 nt, synthetic construct
  source 1..22: mol_type = other RNA
tttctaggaaccatattagagt

SEQ ID NO: 158590 - RNA, 22 nt, synthetic construct
  source 1..22: mol_type = other RNA
tttctaggcatctatttcccca

SEQ ID NO: 158591 - RNA, 22 nt, synthetic construct
  source 1..22: mol_type = other RNA
tttctaggccctaaccccagag

SEQ ID NO: 158592 - RNA, 22 nt, synthetic construct
  source 1..22: mol_type = other RNA
tttctaggtagtttctttgaac

SEQ ID NO: 158593 - RNA, 22 nt, synthetic construct
  source 1..22: mol_type = other RNA
tttctagttagtttgttgaccc

SEQ ID NO: 158594 - RNA, 22 nt, synthetic construct
  source 1..22: mol_type = other RNA
tttctagtttgaggtgtacaat

SEQ ID NO: 158595 - RNA, 22 nt, synthetic construct
  source 1..22: mol_type = other RNA
tttctatacttcatctttcctg

SEQ ID NO: 158596 - RNA, 22 nt, synthetic construct
  source 1..22: mol_type = other RNA
tttctatagtcattccgctaaa

SEQ ID NO: 158597 - RNA, 22 nt, synthetic construct
  source 1..22: mol_type = other RNA
tttctatagtggctgcaccatt

SEQ ID NO: 158598 - RNA, 22 nt, synthetic construct
  source 1..22: mol_type = other RNA
tttctatctctcagatctgagt

SEQ ID NO: 158599 - RNA, 22 nt, synthetic construct
  source 1..22: mol_type = other RNA
tttctatctgaacattttagct

SEQ ID NO: 158600 - RNA, 22 nt, synthetic construct
  source 1..22: mol_type = other RNA
tttctattcattaccaggctgg

SEQ ID NO: 158601 - RNA, 22 nt, synthetic construct
  source 1..22: mol_type = other RNA
tttctattcccctggatccccc

SEQ ID NO: 158602 - RNA, 22 nt, synthetic construct
  source 1..22: mol_type = other RNA
tttctcaaaaatttaagcacag

SEQ ID NO: 158603 - RNA, 22 nt, synthetic construct
  source 1..22: mol_type = other RNA
tttctcaaagcccaccagcata

SEQ ID NO: 158604 - RNA, 22 nt, synthetic construct
  source 1..22: mol_type = other RNA
tttctcaacactgtgttctttt

SEQ ID NO: 158605 - RNA, 22 nt, synthetic construct
  source 1..22: mol_type = other RNA
tttctcaacttagccttggtaa

SEQ ID NO: 158606 - RNA, 22 nt, synthetic construct
  source 1..22: mol_type = other RNA
tttctcaacttcctgttttagt

SEQ ID NO: 158607 - RNA, 22 nt, synthetic construct
  source 1..22: mol_type = other RNA
tttctcaatcccttccccacct

SEQ ID NO: 158608 - RNA, 22 nt, synthetic construct
  source 1..22: mol_type = other RNA
tttctcatactttgtcaggcat

SEQ ID NO: 158609 - RNA, 22 nt, synthetic construct
  source 1..22: mol_type = other RNA
tttctcatctgtcactttccta

SEQ ID NO: 158610 - RNA, 22 nt, synthetic construct
  source 1..22: mol_type = other RNA
tttctcatgtatgttttagcct

SEQ ID NO: 158611 - RNA, 22 nt, synthetic construct
  source 1..22: mol_type = other RNA
tttctcattcttctctaatgta

SEQ ID NO: 158612 - RNA, 22 nt, synthetic construct
  source 1..22: mol_type = other RNA
tttctcatttttcaggggggcc

SEQ ID NO: 158613 - RNA, 22 nt, synthetic construct
  source 1..22: mol_type = other RNA
tttctccacatccttgccaaca

SEQ ID NO: 158614 - RNA, 22 nt, synthetic construct
  source 1..22: mol_type = other RNA
tttctccaggggcggccccgcg

SEQ ID NO: 158615 - RNA, 22 nt, synthetic construct
  source 1..22: mol_type = other RNA
tttctcccaaggttgcctgttc

SEQ ID NO: 158616 - RNA, 22 nt, synthetic construct
  source 1..22: mol_type = other RNA
tttctcccagctgtccaacaag

SEQ ID NO: 158617 - RNA, 22 nt, synthetic construct
  source 1..22: mol_type = other RNA
tttctcccaggtcagtagtaca

SEQ ID NO: 158618 - RNA, 22 nt, synthetic construct
  source 1..22: mol_type = other RNA
tttctcctaagtcttcttctaa

SEQ ID NO: 158619 - RNA, 22 nt, synthetic construct
  source 1..22: mol_type = other RNA
tttctcctgcatggggagtttt

SEQ ID NO: 158620 - RNA, 22 nt, synthetic construct
  source 1..22: mol_type = other RNA
tttctccttctgcaggctgaac

SEQ ID NO: 158621 - RNA, 22 nt, synthetic construct
  source 1..22: mol_type = other RNA
tttctccttctggaagatttct

SEQ ID NO: 158622 - RNA, 22 nt, synthetic construct
  source 1..22: mol_type = other RNA
tttctcgacacacaatccaagt

SEQ ID NO: 158623 - RNA, 22 nt, synthetic construct
  source 1..22: mol_type = other RNA
tttctcgcagcggggatgctca

SEQ ID NO: 158624 - RNA, 22 nt, synthetic construct
  source 1..22: mol_type = other RNA
tttctcggccgggcgcggtgcc

SEQ ID NO: 158625 - RNA, 22 nt, synthetic construct
  source 1..22: mol_type = other RNA
tttctcgtgcatgtctgcagga

SEQ ID NO: 158626 - RNA, 22 nt, synthetic construct
  source 1..22: mol_type = other RNA
tttctctaatagctagtgatgt

SEQ ID NO: 158627 - RNA, 22 nt, synthetic construct
  source 1..22: mol_type = other RNA
tttctctacagttaacaatact

SEQ ID NO: 158628 - RNA, 22 nt, synthetic construct
  source 1..22: mol_type = other RNA
tttctctacatctggatcctgt

SEQ ID NO: 158629 - RNA, 22 nt, synthetic construct
  source 1..22: mol_type = other RNA
tttctctagttgcacggtgaag

SEQ ID NO: 158630 - RNA, 22 nt, synthetic construct
  source 1..22: mol_type = other RNA
tttctctcatgttgggtaaaaa

SEQ ID NO: 158631 - RNA, 22 nt, synthetic construct
  source 1..22: mol_type = other RNA
tttctctccaaggtacaattac

SEQ ID NO: 158632 - RNA, 22 nt, synthetic construct
  source 1..22: mol_type = other RNA
tttctctccttgcacattagaa

SEQ ID NO: 158633 - RNA, 22 nt, synthetic construct
  source 1..22: mol_type = other RNA
tttctctctccctgccctgtga

SEQ ID NO: 158634 - RNA, 22 nt, synthetic construct
  source 1..22: mol_type = other RNA
tttctctgctttttcttggtgg

SEQ ID NO: 158635 - RNA, 22 nt, synthetic construct
  source 1..22: mol_type = other RNA
tttctctttaaagctgaactcc

SEQ ID NO: 158636 - RNA, 22 nt, synthetic construct
  source 1..22: mol_type = other RNA
tttctctttcagccatcccagc

SEQ ID NO: 158637 - RNA, 22 nt, synthetic construct
  source 1..22: mol_type = other RNA
tttctgaaaaatggttttatgg

SEQ ID NO: 158638 - RNA, 22 nt, synthetic construct
  source 1..22: mol_type = other RNA
tttctgaactcaaaagtgaatc

SEQ ID NO: 158639 - RNA, 22 nt, synthetic construct
  source 1..22: mol_type = other RNA
tttctgacaatttcagggagaa

SEQ ID NO: 158640 - RNA, 22 nt, synthetic construct
  source 1..22: mol_type = other RNA
tttctgacacccgacccactag

SEQ ID NO: 158641 - RNA, 22 nt, synthetic construct
  source 1..22: mol_type = other RNA
tttctgacaggtggtatgggag

SEQ ID NO: 158642 - RNA, 22 nt, synthetic construct
  source 1..22: mol_type = other RNA
tttctgaccaactatttcacta

SEQ ID NO: 158643 - RNA, 22 nt, synthetic construct
  source 1..22: mol_type = other RNA
tttctgactctgtgcttgtgct

SEQ ID NO: 158644 - RNA, 22 nt, synthetic construct
  source 1..22: mol_type = other RNA
tttctgagagtattgccaggtt

SEQ ID NO: 158645 - RNA, 22 nt, synthetic construct
  source 1..22: mol_type = other RNA
tttctgagcaactactatttcg

SEQ ID NO: 158646 - RNA, 22 nt, synthetic construct
  source 1..22: mol_type = other RNA
tttctgagccagagtttcactc

SEQ ID NO: 158647 - RNA, 22 nt, synthetic construct
  source 1..22: mol_type = other RNA
tttctgaggtggagttctgctc

SEQ ID NO: 158648 - RNA, 22 nt, synthetic construct
  source 1..22: mol_type = other RNA
tttctgagtatattctgtgaat

SEQ ID NO: 158649 - RNA, 22 nt, synthetic construct
  source 1..22: mol_type = other RNA
tttctgattgcccattataaaa

SEQ ID NO: 158650 - RNA, 22 nt, synthetic construct
  source 1..22: mol_type = other RNA
tttctgatttgctggctcagtc

SEQ ID NO: 158651 - RNA, 22 nt, synthetic construct
  source 1..22: mol_type = other RNA
tttctgcaattggaagactatc

SEQ ID NO: 158652 - RNA, 22 nt, synthetic construct
  source 1..22: mol_type = other RNA
tttctgcatacttagctaattt

SEQ ID NO: 158653 - RNA, 22 nt, synthetic construct
  source 1..22: mol_type = other RNA
tttctgcatagagatcttgtgt

SEQ ID NO: 158654 - RNA, 22 nt, synthetic construct
  source 1..22: mol_type = other RNA
tttctgcatcttttgagggtat

SEQ ID NO: 158655 - RNA, 22 nt, synthetic construct
  source 1..22: mol_type = other RNA
tttctgcatttggtttgcaaaa

SEQ ID NO: 158656 - RNA, 22 nt, synthetic construct
  source 1..22: mol_type = other RNA
tttctgctattctctttctgaa

SEQ ID NO: 158657 - RNA, 22 nt, synthetic construct
  source 1..22: mol_type = other RNA
tttctgcttaaagcctctcaac

SEQ ID NO: 158658 - RNA, 22 nt, synthetic construct
  source 1..22: mol_type = other RNA
tttctgcttagtcttctcagat

SEQ ID NO: 158659 - RNA, 22 nt, synthetic construct
  source 1..22: mol_type = other RNA
tttctgcttctcaataaggaaa

SEQ ID NO: 158660 - RNA, 22 nt, synthetic construct
  source 1..22: mol_type = other RNA
tttctgcttgaatgtgcctaca

SEQ ID NO: 158661 - RNA, 22 nt, synthetic construct
  source 1..22: mol_type = other RNA
tttctggaaactcaaacccaaa

SEQ ID NO: 158662 - RNA, 22 nt, synthetic construct
  source 1..22: mol_type = other RNA
tttctggaagtttcctgcacat

SEQ ID NO: 158663 - RNA, 22 nt, synthetic construct
  source 1..22: mol_type = other RNA
tttctggaccacaatcttaccc

SEQ ID NO: 158664 - RNA, 22 nt, synthetic construct
  source 1..22: mol_type = other RNA
tttctggaggctagaagtccca

SEQ ID NO: 158665 - RNA, 22 nt, synthetic construct
  source 1..22: mol_type = other RNA
tttctgggctctctattccaaa

SEQ ID NO: 158666 - RNA, 22 nt, synthetic construct
  source 1..22: mol_type = other RNA
tttctggggatgctgtctatag

SEQ ID NO: 158667 - RNA, 22 nt, synthetic construct
  source 1..22: mol_type = other RNA
tttctggttttctggaggctag

SEQ ID NO: 158668 - RNA, 22 nt, synthetic construct
  source 1..22: mol_type = other RNA
tttctgtaaacatgaacaagtt

SEQ ID NO: 158669 - RNA, 22 nt, synthetic construct
  source 1..22: mol_type = other RNA
tttctgtaatgtttgtacttct

SEQ ID NO: 158670 - RNA, 22 nt, synthetic construct
  source 1..22: mol_type = other RNA
tttctgtagaatatccaagcac

SEQ ID NO: 158671 - RNA, 22 nt, synthetic construct
  source 1..22: mol_type = other RNA
tttctgtatcttttcagtccag

SEQ ID NO: 158672 - RNA, 22 nt, synthetic construct
  source 1..22: mol_type = other RNA
tttctgtcatctgaatcaataa

SEQ ID NO: 158673 - RNA, 22 nt, synthetic construct
  source 1..22: mol_type = other RNA
tttctgtcattctgcagtttgt

SEQ ID NO: 158674 - RNA, 22 nt, synthetic construct
  source 1..22: mol_type = other RNA
tttctgtccttggattgctaaa

SEQ ID NO: 158675 - RNA, 22 nt, synthetic construct
  source 1..22: mol_type = other RNA
tttctgtgtaatactgtagaat

SEQ ID NO: 158676 - RNA, 22 nt, synthetic construct
  source 1..22: mol_type = other RNA
tttctgttagatggtgctgatt

SEQ ID NO: 158677 - RNA, 22 nt, synthetic construct
  source 1..22: mol_type = other RNA
tttctgttgcttaagtcactcc

SEQ ID NO: 158678 - RNA, 22 nt, synthetic construct
  source 1..22: mol_type = other RNA
tttctgtttctgtgaaaaaaca

SEQ ID NO: 158679 - RNA, 22 nt, synthetic construct
  source 1..22: mol_type = other RNA
tttctgtttggatgaaaaagta

SEQ ID NO: 158680 - RNA, 22 nt, synthetic construct
  source 1..22: mol_type = other RNA
tttctgtttgtttgttttgaga

SEQ ID NO: 158681 - RNA, 22 nt, synthetic construct
  source 1..22: mol_type = other RNA
tttcttaaaactttaggtcaga

SEQ ID NO: 158682 - RNA, 22 nt, synthetic construct
  source 1..22: mol_type = other RNA
tttcttacacattaggctctgg

SEQ ID NO: 158683 - RNA, 22 nt, synthetic construct
  source 1..22: mol_type = other RNA
tttcttaccctcacagtcacaa

SEQ ID NO: 158684 - RNA, 22 nt, synthetic construct
  source 1..22: mol_type = other RNA
tttcttaccctttactcagatt

SEQ ID NO: 158685 - RNA, 22 nt, synthetic construct
  source 1..22: mol_type = other RNA
tttcttacctaagcatcgtgaa

SEQ ID NO: 158686 - RNA, 22 nt, synthetic construct
  source 1..22: mol_type = other RNA
tttcttaggaagctatggagca

SEQ ID NO: 158687 - RNA, 22 nt, synthetic construct
  source 1..22: mol_type = other RNA
tttcttaggtttctcatttttc

SEQ ID NO: 158688 - RNA, 22 nt, synthetic construct
  source 1..22: mol_type = other RNA
tttcttagttccattattccat

SEQ ID NO: 158689 - RNA, 22 nt, synthetic construct
  source 1..22: mol_type = other RNA
tttcttatctaggcgaaatatc

SEQ ID NO: 158690 - RNA, 22 nt, synthetic construct
  source 1..22: mol_type = other RNA
tttcttattttttcccagatac

SEQ ID NO: 158691 - RNA, 22 nt, synthetic construct
  source 1..22: mol_type = other RNA
tttcttcaaccatacttttcaa

SEQ ID NO: 158692 - RNA, 22 nt, synthetic construct
  source 1..22: mol_type = other RNA
tttcttcaagatactgcactaa

SEQ ID NO: 158693 - RNA, 22 nt, synthetic construct
  source 1..22: mol_type = other RNA
tttcttcactcttaaaaggaga

SEQ ID NO: 158694 - RNA, 22 nt, synthetic construct
  source 1..22: mol_type = other RNA
tttcttcagaagaaattacttc

SEQ ID NO: 158695 - RNA, 22 nt, synthetic construct
  source 1..22: mol_type = other RNA
tttcttcatggactagactgcc

SEQ ID NO: 158696 - RNA, 22 nt, synthetic construct
  source 1..22: mol_type = other RNA
tttcttcccatctcactcacct

SEQ ID NO: 158697 - RNA, 22 nt, synthetic construct
  source 1..22: mol_type = other RNA
tttcttctagtcacatttgctt

SEQ ID NO: 158698 - RNA, 22 nt, synthetic construct
  source 1..22: mol_type = other RNA
tttcttctccctcttcgctctt

SEQ ID NO: 158699 - RNA, 22 nt, synthetic construct
  source 1..22: mol_type = other RNA
tttcttctgaagaaattatctg

SEQ ID NO: 158700 - RNA, 22 nt, synthetic construct
  source 1..22: mol_type = other RNA
tttcttcttgttttgttctcgt

SEQ ID NO: 158701 - RNA, 22 nt, synthetic construct
  source 1..22: mol_type = other RNA
tttcttctttggctcaatggtt

SEQ ID NO: 158702 - RNA, 22 nt, synthetic construct
  source 1..22: mol_type = other RNA
tttcttgaatctctctatccac

SEQ ID NO: 158703 - RNA, 22 nt, synthetic construct
  source 1..22: mol_type = other RNA
tttcttgacctcagtggtagtt

SEQ ID NO: 158704 - RNA, 22 nt, synthetic construct
  source 1..22: mol_type = other RNA
tttcttgctttgctgccccagc

SEQ ID NO: 158705 - RNA, 22 nt, synthetic construct
  source 1..22: mol_type = other RNA
tttcttggggctctaatgcaag

SEQ ID NO: 158706 - RNA, 22 nt, synthetic construct
  source 1..22: mol_type = other RNA
tttcttggtctgcagactcttg

SEQ ID NO: 158707 - RNA, 22 nt, synthetic construct
  source 1..22: mol_type = other RNA
tttcttggtggtaactgatgtg

SEQ ID NO: 158708 - RNA, 22 nt, synthetic construct
  source 1..22: mol_type = other RNA
tttcttgtgggtattttgttgt

SEQ ID NO: 158709 - RNA, 22 nt, synthetic construct
  source 1..22: mol_type = other RNA
tttcttgttagtaggaaaacca

SEQ ID NO: 158710 - RNA, 22 nt, synthetic construct
  source 1..22: mol_type = other RNA
tttctttaaaaccagagcggaa

SEQ ID NO: 158711 - RNA, 22 nt, synthetic construct
  source 1..22: mol_type = other RNA
tttctttcaaatgtgacagaac

SEQ ID NO: 158712 - RNA, 22 nt, synthetic construct
  source 1..22: mol_type = other RNA
tttctttccattcaatccttgt

SEQ ID NO: 158713 - RNA, 22 nt, synthetic construct
  source 1..22: mol_type = other RNA
tttctttcgcatcattcaaatg

SEQ ID NO: 158714 - RNA, 22 nt, synthetic construct
  source 1..22: mol_type = other RNA
tttctttgagtagttcatgtta

SEQ ID NO: 158715 - RNA, 22 nt, synthetic construct
  source 1..22: mol_type = other RNA
tttctttggctgttagccttgc

SEQ ID NO: 158716 - RNA, 22 nt, synthetic construct
  source 1..22: mol_type = other RNA
tttctttggttttgactcagta

SEQ ID NO: 158717 - RNA, 22 nt, synthetic construct
  source 1..22: mol_type = other RNA
tttcttttaaagacctcaggtt

SEQ ID NO: 158718 - RNA, 22 nt, synthetic construct
  source 1..22: mol_type = other RNA
tttcttttcacataaatttgcc

SEQ ID NO: 158719 - RNA, 22 nt, synthetic construct
  source 1..22: mol_type = other RNA
tttcttttcactctaatatggt

SEQ ID NO: 158720 - RNA, 22 nt, synthetic construct
  source 1..22: mol_type = other RNA
tttcttttccaaccaagcccaa

SEQ ID NO: 158721 - RNA, 22 nt, synthetic construct
  source 1..22: mol_type = other RNA
tttcttttgtgggtaaattaag

SEQ ID NO: 158722 - RNA, 22 nt, synthetic construct
  source 1..22: mol_type = other RNA
tttcttttgttgcctgtagttt

SEQ ID NO: 158723 - RNA, 22 nt, synthetic construct
  source 1..22: mol_type = other RNA
tttctttttaaacaggtgtaag

SEQ ID NO: 158724 - RNA, 22 nt, synthetic construct
  source 1..22: mol_type = other RNA
tttctttttactcatgtctacc

SEQ ID NO: 158725 - RNA, 22 nt, synthetic construct
  source 1..22: mol_type = other RNA
tttctttttagtaagaggtatc

SEQ ID NO: 158726 - RNA, 22 nt, synthetic construct
  source 1..22: mol_type = other RNA
tttctttttcttgctttgctgc

SEQ ID NO: 158727 - RNA, 22 nt, synthetic construct
  source 1..22: mol_type = other RNA
tttctttttgttttctccttct

SEQ ID NO: 158728 - RNA, 22 nt, synthetic construct
  source 1..22: mol_type = other RNA
tttgaaaaaacttcccttagct

SEQ ID NO: 158729 - RNA, 22 nt, synthetic construct
  source 1..22: mol_type = other RNA
tttgaaaaacagatcttggccg

SEQ ID NO: 158730 - RNA, 22 nt, synthetic construct
  source 1..22: mol_type = other RNA
tttgaaaaaggaaagtaactgt

SEQ ID NO: 158731 - RNA, 22 nt, synthetic construct
  source 1..22: mol_type = other RNA
tttgaaaaatgtcaattttccc

SEQ ID NO: 158732 - RNA, 22 nt, synthetic construct
  source 1..22: mol_type = other RNA
tttgaaaagaacaacatggtag

SEQ ID NO: 158733 - RNA, 22 nt, synthetic construct
  source 1..22: mol_type = other RNA
tttgaaaagctcaaaaatactc

SEQ ID NO: 158734 - RNA, 22 nt, synthetic construct
  source 1..22: mol_type = other RNA
tttgaaaagtgtttgtcacata

SEQ ID NO: 158735 - RNA, 22 nt, synthetic construct
  source 1..22: mol_type = other RNA
tttgaaactgagcatcccagag

SEQ ID NO: 158736 - RNA, 22 nt, synthetic construct
  source 1..22: mol_type = other RNA
tttgaaagaaagaaggccattt

SEQ ID NO: 158737 - RNA, 22 nt, synthetic construct
  source 1..22: mol_type = other RNA
tttgaaaggaatccggctttat

SEQ ID NO: 158738 - RNA, 22 nt, synthetic construct
  source 1..22: mol_type = other RNA
tttgaaatcagaacttgacaag

SEQ ID NO: 158739 - RNA, 22 nt, synthetic construct
  source 1..22: mol_type = other RNA
tttgaaatcaggaagtatgagt

SEQ ID NO: 158740 - RNA, 22 nt, synthetic construct
  source 1..22: mol_type = other RNA
tttgaaatttaaagacgttcag

SEQ ID NO: 158741 - RNA, 22 nt, synthetic construct
  source 1..22: mol_type = other RNA
tttgaacaagagcgtcgtacct

SEQ ID NO: 158742 - RNA, 22 nt, synthetic construct
  source 1..22: mol_type = other RNA
tttgaacactctgcaattttaa

SEQ ID NO: 158743 - RNA, 22 nt, synthetic construct
  source 1..22: mol_type = other RNA
tttgaaccccagaaggttaact

SEQ ID NO: 158744 - RNA, 22 nt, synthetic construct
  source 1..22: mol_type = other RNA
tttgaacgaatgaaaacacaac

SEQ ID NO: 158745 - RNA, 22 nt, synthetic construct
  source 1..22: mol_type = other RNA
tttgaactcactggccagcatt

SEQ ID NO: 158746 - RNA, 22 nt, synthetic construct
  source 1..22: mol_type = other RNA
tttgaactttccagaagtaact

SEQ ID NO: 158747 - RNA, 22 nt, synthetic construct
  source 1..22: mol_type = other RNA
tttgaagaaagttttgcagttg

SEQ ID NO: 158748 - RNA, 22 nt, synthetic construct
  source 1..22: mol_type = other RNA
tttgaagcttcacttctctgct

SEQ ID NO: 158749 - RNA, 22 nt, synthetic construct
  source 1..22: mol_type = other RNA
tttgaagtatgtaattacaggg

SEQ ID NO: 158750 - RNA, 22 nt, synthetic construct
  source 1..22: mol_type = other RNA
tttgaataaagggtcagaattt

SEQ ID NO: 158751 - RNA, 22 nt, synthetic construct
  source 1..22: mol_type = other RNA
tttgaataacctcataagaact

SEQ ID NO: 158752 - RNA, 22 nt, synthetic construct
  source 1..22: mol_type = other RNA
tttgaataaggtctgtaagtca

SEQ ID NO: 158753 - RNA, 22 nt, synthetic construct
  source 1..22: mol_type = other RNA
tttgaatcatgggagccaaact

SEQ ID NO: 158754 - RNA, 22 nt, synthetic construct
  source 1..22: mol_type = other RNA
tttgaatgatgcgaaagaaaaa

SEQ ID NO: 158755 - RNA, 22 nt, synthetic construct
  source 1..22: mol_type = other RNA
tttgaattaagcaccactagag

SEQ ID NO: 158756 - RNA, 22 nt, synthetic construct
  source 1..22: mol_type = other RNA
tttgaatttaagacacaaggaa

SEQ ID NO: 158757 - RNA, 22 nt, synthetic construct
  source 1..22: mol_type = other RNA
tttgaatttggaaagggtagag

SEQ ID NO: 158758 - RNA, 22 nt, synthetic construct
  source 1..22: mol_type = other RNA
tttgaattttccattcacacac

SEQ ID NO: 158759 - RNA, 22 nt, synthetic construct
  source 1..22: mol_type = other RNA
tttgacagatgagactcttaat

SEQ ID NO: 158760 - RNA, 22 nt, synthetic construct
  source 1..22: mol_type = other RNA
tttgacagccacgtgtattgag

SEQ ID NO: 158761 - RNA, 22 nt, synthetic construct
  source 1..22: mol_type = other RNA
tttgacatgacaggtgagtgga

SEQ ID NO: 158762 - RNA, 22 nt, synthetic construct
  source 1..22: mol_type = other RNA
tttgaccatgggacaagtgggt

SEQ ID NO: 158763 - RNA, 22 nt, synthetic construct
  source 1..22: mol_type = other RNA
tttgacctgtaatttttctctt

SEQ ID NO: 158764 - RNA, 22 nt, synthetic construct
  source 1..22: mol_type = other RNA
tttgaccttccttgtgtcttaa

SEQ ID NO: 158765 - RNA, 22 nt, synthetic construct
  source 1..22: mol_type = other RNA
tttgacgcgcaacaattcaaca

SEQ ID NO: 158766 - RNA, 22 nt, synthetic construct
  source 1..22: mol_type = other RNA
tttgactcagtacttccctctt

SEQ ID NO: 158767 - RNA, 22 nt, synthetic construct
  source 1..22: mol_type = other RNA
tttgacttctcagggcctgctt

SEQ ID NO: 158768 - RNA, 22 nt, synthetic construct
  source 1..22: mol_type = other RNA
tttgagaaaggtttcttcactc

SEQ ID NO: 158769 - RNA, 22 nt, synthetic construct
  source 1..22: mol_type = other RNA
tttgagaagccacacagtacaa

SEQ ID NO: 158770 - RNA, 22 nt, synthetic construct
  source 1..22: mol_type = other RNA
tttgagaagtcttttcctaccc

SEQ ID NO: 158771 - RNA, 22 nt, synthetic construct
  source 1..22: mol_type = other RNA
tttgagaatttcaggtgtgtaa

SEQ ID NO: 158772 - RNA, 22 nt, synthetic construct
  source 1..22: mol_type = other RNA
tttgagacacggtctcacactg

SEQ ID NO: 158773 - RNA, 22 nt, synthetic construct
  source 1..22: mol_type = other RNA
tttgagacagattctctgtctc

SEQ ID NO: 158774 - RNA, 22 nt, synthetic construct
  source 1..22: mol_type = other RNA
tttgagacagggtctcactctt

SEQ ID NO: 158775 - RNA, 22 nt, synthetic construct
  source 1..22: mol_type = other RNA
tttgagaccagcgtgggcaaca

SEQ ID NO: 158776 - RNA, 22 nt, synthetic construct
  source 1..22: mol_type = other RNA
tttgagacctcaggcagtctag

SEQ ID NO: 158777 - RNA, 22 nt, synthetic construct
  source 1..22: mol_type = other RNA
tttgagacggaatcttaccctg

SEQ ID NO: 158778 - RNA, 22 nt, synthetic construct
  source 1..22: mol_type = other RNA
tttgagactgcagtgacctatc

SEQ ID NO: 158779 - RNA, 22 nt, synthetic construct
  source 1..22: mol_type = other RNA
tttgagagtaagttgcatacgt

SEQ ID NO: 158780 - RNA, 22 nt, synthetic construct
  source 1..22: mol_type = other RNA
tttgagagtgcagtatgtagga

SEQ ID NO: 158781 - RNA, 22 nt, synthetic construct
  source 1..22: mol_type = other RNA
tttgagatttgagtcttgctct

SEQ ID NO: 158782 - RNA, 22 nt, synthetic construct
  source 1..22: mol_type = other RNA
tttgagcagagtcctgagggtg

SEQ ID NO: 158783 - RNA, 22 nt, synthetic construct
  source 1..22: mol_type = other RNA
tttgagcccaggaggttgaagc

SEQ ID NO: 158784 - RNA, 22 nt, synthetic construct
  source 1..22: mol_type = other RNA
tttgagctacaaactccaaacc

SEQ ID NO: 158785 - RNA, 22 nt, synthetic construct
  source 1..22: mol_type = other RNA
tttgagctgaaagtaaagatag

SEQ ID NO: 158786 - RNA, 22 nt, synthetic construct
  source 1..22: mol_type = other RNA
tttgaggcagagagatggtggg

SEQ ID NO: 158787 - RNA, 22 nt, synthetic construct
  source 1..22: mol_type = other RNA
tttgaggcattagtgaattcac

SEQ ID NO: 158788 - RNA, 22 nt, synthetic construct
  source 1..22: mol_type = other RNA
tttgaggccctattcaacctat

SEQ ID NO: 158789 - RNA, 22 nt, synthetic construct
  source 1..22: mol_type = other RNA
tttgaggccgcagtgagccatg

SEQ ID NO: 158790 - RNA, 22 nt, synthetic construct
  source 1..22: mol_type = other RNA
tttgaggctgggagtacaagac

SEQ ID NO: 158791 - RNA, 22 nt, synthetic construct
  source 1..22: mol_type = other RNA
tttgaggcttttcatagtcatc

SEQ ID NO: 158792 - RNA, 22 nt, synthetic construct
  source 1..22: mol_type = other RNA
tttgaggcttttggattttctt

SEQ ID NO: 158793 - RNA, 22 nt, synthetic construct
  source 1..22: mol_type = other RNA
tttgagggtgctgatcaggaaa

SEQ ID NO: 158794 - RNA, 22 nt, synthetic construct
  source 1..22: mol_type = other RNA
tttgagggttagaagacaatac

SEQ ID NO: 158795 - RNA, 22 nt, synthetic construct
  source 1..22: mol_type = other RNA
tttgaggtaagaacttgtcttt

SEQ ID NO: 158796 - RNA, 22 nt, synthetic construct
  source 1..22: mol_type = other RNA
tttgaggtagcacaactagtaa

SEQ ID NO: 158797 - RNA, 22 nt, synthetic construct
  source 1..22: mol_type = other RNA
tttgaggtctaggctaatgtgt

SEQ ID NO: 158798 - RNA, 22 nt, synthetic construct
  source 1..22: mol_type = other RNA
tttgaggtcttctagctttcag

SEQ ID NO: 158799 - RNA, 22 nt, synthetic construct
  source 1..22: mol_type = other RNA
tttgaggtgtacaattaggctg

SEQ ID NO: 158800 - RNA, 22 nt, synthetic construct
  source 1..22: mol_type = other RNA
tttgaggttattaagataatgc

SEQ ID NO: 158801 - RNA, 22 nt, synthetic construct
  source 1..22: mol_type = other RNA
tttgagtagcaccctatttatg

SEQ ID NO: 158802 - RNA, 22 nt, synthetic construct
  source 1..22: mol_type = other RNA
tttgagtagttcatgttagcat

SEQ ID NO: 158803 - RNA, 22 nt, synthetic construct
  source 1..22: mol_type = other RNA
tttgagtatttcatgtacttgt

SEQ ID NO: 158804 - RNA, 22 nt, synthetic construct
  source 1..22: mol_type = other RNA
tttgagtcttgctctcttgcct

SEQ ID NO: 158805 - RNA, 22 nt, synthetic construct
  source 1..22: mol_type = other RNA
tttgagtggcatcatactggaa

SEQ ID NO: 158806 - RNA, 22 nt, synthetic construct
  source 1..22: mol_type = other RNA
tttgagtgtaaggtgtttggtg

SEQ ID NO: 158807 - RNA, 22 nt, synthetic construct
  source 1..22: mol_type = other RNA
tttgagttattgcatagggatg

SEQ ID NO: 158808 - RNA, 22 nt, synthetic construct
  source 1..22: mol_type = other RNA
tttgagttcagaaagattaatc

SEQ ID NO: 158809 - RNA, 22 nt, synthetic construct
  source 1..22: mol_type = other RNA
tttgagttcagttttgtatatg

SEQ ID NO: 158810 - RNA, 22 nt, synthetic construct
  source 1..22: mol_type = other RNA
tttgagttgtttccactttgag

SEQ ID NO: 158811 - RNA, 22 nt, synthetic construct
  source 1..22: mol_type = other RNA
tttgagtttccagaaaactggc

SEQ ID NO: 158812 - RNA, 22 nt, synthetic construct
  source 1..22: mol_type = other RNA
tttgagtttggtgtatttagta

SEQ ID NO: 158813 - RNA, 22 nt, synthetic construct
  source 1..22: mol_type = other RNA
tttgataaaaatctctacaggg

SEQ ID NO: 158814 - RNA, 22 nt, synthetic construct
  source 1..22: mol_type = other RNA
tttgatacggagtctcgctctg

SEQ ID NO: 158815 - RNA, 22 nt, synthetic construct
  source 1..22: mol_type = other RNA
tttgatagttgcagattcatct

SEQ ID NO: 158816 - RNA, 22 nt, synthetic construct
  source 1..22: mol_type = other RNA
tttgatcatacacatccagaag

SEQ ID NO: 158817 - RNA, 22 nt, synthetic construct
  source 1..22: mol_type = other RNA
tttgatcatcgcattacgagtt

SEQ ID NO: 158818 - RNA, 22 nt, synthetic construct
  source 1..22: mol_type = other RNA
tttgatccattttgagttcagt

SEQ ID NO: 158819 - RNA, 22 nt, synthetic construct
  source 1..22: mol_type = other RNA
tttgatcccactagtggaagaa

SEQ ID NO: 158820 - RNA, 22 nt, synthetic construct
  source 1..22: mol_type = other RNA
tttgatcctggaatagtagctt

SEQ ID NO: 158821 - RNA, 22 nt, synthetic construct
  source 1..22: mol_type = other RNA
tttgatctggtcacaaacacaa

SEQ ID NO: 158822 - RNA, 22 nt, synthetic construct
  source 1..22: mol_type = other RNA
tttgatgaattccagtttatct

SEQ ID NO: 158823 - RNA, 22 nt, synthetic construct
  source 1..22: mol_type = other RNA
tttgatgacttacagatatcac

SEQ ID NO: 158824 - RNA, 22 nt, synthetic construct
  source 1..22: mol_type = other RNA
tttgatgcacaaaagtttaact

SEQ ID NO: 158825 - RNA, 22 nt, synthetic construct
  source 1..22: mol_type = other RNA
tttgatgcccccaccctttttt

SEQ ID NO: 158826 - RNA, 22 nt, synthetic construct
  source 1..22: mol_type = other RNA
tttgattactgactcaatcttc

SEQ ID NO: 158827 - RNA, 22 nt, synthetic construct
  source 1..22: mol_type = other RNA
tttgattagttgactcctaaaa

SEQ ID NO: 158828 - RNA, 22 nt, synthetic construct
  source 1..22: mol_type = other RNA
tttgattatgttagatatccca

SEQ ID NO: 158829 - RNA, 22 nt, synthetic construct
  source 1..22: mol_type = other RNA
tttgattgccagttttctggaa

SEQ ID NO: 158830 - RNA, 22 nt, synthetic construct
  source 1..22: mol_type = other RNA
tttgattgggcattaattgaga

SEQ ID NO: 158831 - RNA, 22 nt, synthetic construct
  source 1..22: mol_type = other RNA
tttgattgttagccacagcgtt

SEQ ID NO: 158832 - RNA, 22 nt, synthetic construct
  source 1..22: mol_type = other RNA
tttgattgttccaggggggaaa

SEQ ID NO: 158833 - RNA, 22 nt, synthetic construct
  source 1..22: mol_type = other RNA
tttgatttcttctttggctcaa

SEQ ID NO: 158834 - RNA, 22 nt, synthetic construct
  source 1..22: mol_type = other RNA
tttgcaaaaattttgttcagga

SEQ ID NO: 158835 - RNA, 22 nt, synthetic construct
  source 1..22: mol_type = other RNA
tttgcaaaccaaatgcagaaaa

SEQ ID NO: 158836 - RNA, 22 nt, synthetic construct
  source 1..22: mol_type = other RNA
tttgcaagatgcataagttcta

SEQ ID NO: 158837 - RNA, 22 nt, synthetic construct
  source 1..22: mol_type = other RNA
tttgcaagattaatcttgtgaa

SEQ ID NO: 158838 - RNA, 22 nt, synthetic construct
  source 1..22: mol_type = other RNA
tttgcaatacagttaacgtatg

SEQ ID NO: 158839 - RNA, 22 nt, synthetic construct
  source 1..22: mol_type = other RNA
tttgcaatttatatgatactcg

SEQ ID NO: 158840 - RNA, 22 nt, synthetic construct
  source 1..22: mol_type = other RNA
tttgcacacaccaaatcatgaa

SEQ ID NO: 158841 - RNA, 22 nt, synthetic construct
  source 1..22: mol_type = other RNA
tttgcactggcacagcactgtt

SEQ ID NO: 158842 - RNA, 22 nt, synthetic construct
  source 1..22: mol_type = other RNA
tttgcagagacggggtcccact

SEQ ID NO: 158843 - RNA, 22 nt, synthetic construct
  source 1..22: mol_type = other RNA
tttgcagagcaaactcagatct

SEQ ID NO: 158844 - RNA, 22 nt, synthetic construct
  source 1..22: mol_type = other RNA
tttgcagtagtattgaactgtt

SEQ ID NO: 158845 - RNA, 22 nt, synthetic construct
  source 1..22: mol_type = other RNA
tttgcagttggggactcttatg

SEQ ID NO: 158846 - RNA, 22 nt, synthetic construct
  source 1..22: mol_type = other RNA
tttgcattacatgaatggaaaa

SEQ ID NO: 158847 - RNA, 22 nt, synthetic construct
  source 1..22: mol_type = other RNA
tttgcattcctgaaatgaacca

SEQ ID NO: 158848 - RNA, 22 nt, synthetic construct
  source 1..22: mol_type = other RNA
tttgcatttctctaatagctag

SEQ ID NO: 158849 - RNA, 22 nt, synthetic construct
  source 1..22: mol_type = other RNA
tttgccaaaatgattttcacag

SEQ ID NO: 158850 - RNA, 22 nt, synthetic construct
  source 1..22: mol_type = other RNA
tttgccaaagattcttgtcatg

SEQ ID NO: 158851 - RNA, 22 nt, synthetic construct
  source 1..22: mol_type = other RNA
tttgccaaattatttgagagta

SEQ ID NO: 158852 - RNA, 22 nt, synthetic construct
  source 1..22: mol_type = other RNA
tttgccaagtataagatgatga

SEQ ID NO: 158853 - RNA, 22 nt, synthetic construct
  source 1..22: mol_type = other RNA
tttgccaatcaataattctgtg

SEQ ID NO: 158854 - RNA, 22 nt, synthetic construct
  source 1..22: mol_type = other RNA
tttgccacattttaccaaaaca

SEQ ID NO: 158855 - RNA, 22 nt, synthetic construct
  source 1..22: mol_type = other RNA
tttgccagctaacttttaaccc

SEQ ID NO: 158856 - RNA, 22 nt, synthetic construct
  source 1..22: mol_type = other RNA
tttgccagtgttttaaagcagg

SEQ ID NO: 158857 - RNA, 22 nt, synthetic construct
  source 1..22: mol_type = other RNA
tttgccatcttcaagatttcat

SEQ ID NO: 158858 - RNA, 22 nt, synthetic construct
  source 1..22: mol_type = other RNA
tttgcccactcttatatcctaa

SEQ ID NO: 158859 - RNA, 22 nt, synthetic construct
  source 1..22: mol_type = other RNA
tttgcctaagtctcaggataca

SEQ ID NO: 158860 - RNA, 22 nt, synthetic construct
  source 1..22: mol_type = other RNA
tttgcctattctggggctcaag

SEQ ID NO: 158861 - RNA, 22 nt, synthetic construct
  source 1..22: mol_type = other RNA
tttgcctcctgggttcaggtgc

SEQ ID NO: 158862 - RNA, 22 nt, synthetic construct
  source 1..22: mol_type = other RNA
tttgcctctccagggaggaatc

SEQ ID NO: 158863 - RNA, 22 nt, synthetic construct
  source 1..22: mol_type = other RNA
tttgcctctttgctaataagtg

SEQ ID NO: 158864 - RNA, 22 nt, synthetic construct
  source 1..22: mol_type = other RNA
tttgcctgcgtccgtagaccga

SEQ ID NO: 158865 - RNA, 22 nt, synthetic construct
  source 1..22: mol_type = other RNA
tttgcctggatgaatgcagtgg

SEQ ID NO: 158866 - RNA, 22 nt, synthetic construct
  source 1..22: mol_type = other RNA
tttgcctttcactttgatcata

SEQ ID NO: 158867 - RNA, 22 nt, synthetic construct
  source 1..22: mol_type = other RNA
tttgcctttcgcttttggagct

SEQ ID NO: 158868 - RNA, 22 nt, synthetic construct
  source 1..22: mol_type = other RNA
tttgccttttcactcttagtga

SEQ ID NO: 158869 - RNA, 22 nt, synthetic construct
  source 1..22: mol_type = other RNA
tttgcgaaacacactcgtgtat

SEQ ID NO: 158870 - RNA, 22 nt, synthetic construct
  source 1..22: mol_type = other RNA
tttgcgaaatagtagttgctca

SEQ ID NO: 158871 - RNA, 22 nt, synthetic construct
  source 1..22: mol_type = other RNA
tttgcggcttgattagcttcct

SEQ ID NO: 158872 - RNA, 22 nt, synthetic construct
  source 1..22: mol_type = other RNA
tttgcgtctgtgattatcaggg

SEQ ID NO: 158873 - RNA, 22 nt, synthetic construct
  source 1..22: mol_type = other RNA
tttgctaataagtgagtttgac

SEQ ID NO: 158874 - RNA, 22 nt, synthetic construct
  source 1..22: mol_type = other RNA
tttgctaataatgatgactatg

SEQ ID NO: 158875 - RNA, 22 nt, synthetic construct
  source 1..22: mol_type = other RNA
tttgctagagctgctgtaacaa

SEQ ID NO: 158876 - RNA, 22 nt, synthetic construct
  source 1..22: mol_type = other RNA
tttgctagtattttgttgacat

SEQ ID NO: 158877 - RNA, 22 nt, synthetic construct
  source 1..22: mol_type = other RNA
tttgctagtggtaactagatgc

SEQ ID NO: 158878 - RNA, 22 nt, synthetic construct
  source 1..22: mol_type = other RNA
tttgctcacacttactaaatga

SEQ ID NO: 158879 - RNA, 22 nt, synthetic construct
  source 1..22: mol_type = other RNA
tttgctctgcaaatgaggttgc

SEQ ID NO: 158880 - RNA, 22 nt, synthetic construct
  source 1..22: mol_type = other RNA
tttgctgagggaatttttctta

SEQ ID NO: 158881 - RNA, 22 nt, synthetic construct
  source 1..22: mol_type = other RNA
tttgctgcatcccaagggtttt

SEQ ID NO: 158882 - RNA, 22 nt, synthetic construct
  source 1..22: mol_type = other RNA
tttgctgccaagtcagcacttc

SEQ ID NO: 158883 - RNA, 22 nt, synthetic construct
  source 1..22: mol_type = other RNA
tttgctgccccagctaaaatgt

SEQ ID NO: 158884 - RNA, 22 nt, synthetic construct
  source 1..22: mol_type = other RNA
tttgctggctcagtctgtttgc

SEQ ID NO: 158885 - RNA, 22 nt, synthetic construct
  source 1..22: mol_type = other RNA
tttgctgtataacattttctct

SEQ ID NO: 158886 - RNA, 22 nt, synthetic construct
  source 1..22: mol_type = other RNA
tttgctgtatacccaggtgtga

SEQ ID NO: 158887 - RNA, 22 nt, synthetic construct
  source 1..22: mol_type = other RNA
tttgctgtcaggcaagggactg

SEQ ID NO: 158888 - RNA, 22 nt, synthetic construct
  source 1..22: mol_type = other RNA
tttgcttaaagttggtcctgca

SEQ ID NO: 158889 - RNA, 22 nt, synthetic construct
  source 1..22: mol_type = other RNA
tttgcttactgtagcattgaag

SEQ ID NO: 158890 - RNA, 22 nt, synthetic construct
  source 1..22: mol_type = other RNA
tttgcttaggctgttattagag

SEQ ID NO: 158891 - RNA, 22 nt, synthetic construct
  source 1..22: mol_type = other RNA
tttgcttcccacttcgaaagtt

SEQ ID NO: 158892 - RNA, 22 nt, synthetic construct
  source 1..22: mol_type = other RNA
tttgcttcgaagcttattaaaa

SEQ ID NO: 158893 - RNA, 22 nt, synthetic construct
  source 1..22: mol_type = other RNA
tttgctttactactgcattttt

SEQ ID NO: 158894 - RNA, 22 nt, synthetic construct
  source 1..22: mol_type = other RNA
tttgctttggagtcacagtgaa

SEQ ID NO: 158895 - RNA, 22 nt, synthetic construct
  source 1..22: mol_type = other RNA
tttgctttggagtgagaggact

SEQ ID NO: 158896 - RNA, 22 nt, synthetic construct
  source 1..22: mol_type = other RNA
tttgctttgggtctatagttta

SEQ ID NO: 158897 - RNA, 22 nt, synthetic construct
  source 1..22: mol_type = other RNA
tttgcttttcctggaaaacttc

SEQ ID NO: 158898 - RNA, 22 nt, synthetic construct
  source 1..22: mol_type = other RNA
tttgcttttgctttgggtctat

SEQ ID NO: 158899 - RNA, 22 nt, synthetic construct
  source 1..22: mol_type = other RNA
tttggaaaaatgtccgttgaag

SEQ ID NO: 158900 - RNA, 22 nt, synthetic construct
  source 1..22: mol_type = other RNA
tttggaaagggtagagcacttt

SEQ ID NO: 158901 - RNA, 22 nt, synthetic construct
  source 1..22: mol_type = other RNA
tttggaaatatggtcactgctg

SEQ ID NO: 158902 - RNA, 22 nt, synthetic construct
  source 1..22: mol_type = other RNA
tttggaaccagcctggccaata

SEQ ID NO: 158903 - RNA, 22 nt, synthetic construct
  source 1..22: mol_type = other RNA
tttggaagactatgagaaggat

SEQ ID NO: 158904 - RNA, 22 nt, synthetic construct
  source 1..22: mol_type = other RNA
tttggaagagagaaggctgcca

SEQ ID NO: 158905 - RNA, 22 nt, synthetic construct
  source 1..22: mol_type = other RNA
tttggaagcatgtggccaggag

SEQ ID NO: 158906 - RNA, 22 nt, synthetic construct
  source 1..22: mol_type = other RNA
tttggaaggtaggagggtgtga

SEQ ID NO: 158907 - RNA, 22 nt, synthetic construct
  source 1..22: mol_type = other RNA
tttggaatagagagcccagaaa

SEQ ID NO: 158908 - RNA, 22 nt, synthetic construct
  source 1..22: mol_type = other RNA
tttggaattaaaatgttgccaa

SEQ ID NO: 158909 - RNA, 22 nt, synthetic construct
  source 1..22: mol_type = other RNA
tttggaatttaaggggtaaatg

SEQ ID NO: 158910 - RNA, 22 nt, synthetic construct
  source 1..22: mol_type = other RNA
tttggagctataatttatctgg

SEQ ID NO: 158911 - RNA, 22 nt, synthetic construct
  source 1..22: mol_type = other RNA
tttggagctgtatttttgctca

SEQ ID NO: 158912 - RNA, 22 nt, synthetic construct
  source 1..22: mol_type = other RNA
tttggagtcacagtgaattctg

SEQ ID NO: 158913 - RNA, 22 nt, synthetic construct
  source 1..22: mol_type = other RNA
tttggagtgagaggactgcctg

SEQ ID NO: 158914 - RNA, 22 nt, synthetic construct
  source 1..22: mol_type = other RNA
tttggagtttgtagctcaaagc

SEQ ID NO: 158915 - RNA, 22 nt, synthetic construct
  source 1..22: mol_type = other RNA
tttggatatccccatttttctc

SEQ ID NO: 158916 - RNA, 22 nt, synthetic construct
  source 1..22: mol_type = other RNA
tttggatgaaaaagtactggaa

SEQ ID NO: 158917 - RNA, 22 nt, synthetic construct
  source 1..22: mol_type = other RNA
tttggatgaacgctaaattaaa

SEQ ID NO: 158918 - RNA, 22 nt, synthetic construct
  source 1..22: mol_type = other RNA
tttggatgcagatttcttttta

SEQ ID NO: 158919 - RNA, 22 nt, synthetic construct
  source 1..22: mol_type = other RNA
tttggattgcgattgtttcagt

SEQ ID NO: 158920 - RNA, 22 nt, synthetic construct
  source 1..22: mol_type = other RNA
tttggatttgagtaactaaact

SEQ ID NO: 158921 - RNA, 22 nt, synthetic construct
  source 1..22: mol_type = other RNA
tttggcaaaaaatgcagtagta

SEQ ID NO: 158922 - RNA, 22 nt, synthetic construct
  source 1..22: mol_type = other RNA
tttggcaaattgtcagattttc

SEQ ID NO: 158923 - RNA, 22 nt, synthetic construct
  source 1..22: mol_type = other RNA
tttggcagcgtaactccatctt

SEQ ID NO: 158924 - RNA, 22 nt, synthetic construct
  source 1..22: mol_type = other RNA
tttggcatacaactgctcataa

SEQ ID NO: 158925 - RNA, 22 nt, synthetic construct
  source 1..22: mol_type = other RNA
tttggccagaatccctttcgct

SEQ ID NO: 158926 - RNA, 22 nt, synthetic construct
  source 1..22: mol_type = other RNA
tttggcccagccatcccattac

SEQ ID NO: 158927 - RNA, 22 nt, synthetic construct
  source 1..22: mol_type = other RNA
tttggcccatatccttttatgt

SEQ ID NO: 158928 - RNA, 22 nt, synthetic construct
  source 1..22: mol_type = other RNA
tttggcccattttcgaattaga

SEQ ID NO: 158929 - RNA, 22 nt, synthetic construct
  source 1..22: mol_type = other RNA
tttggcctctgcggcggctgag

SEQ ID NO: 158930 - RNA, 22 nt, synthetic construct
  source 1..22: mol_type = other RNA
tttggctactgtaaacaatgct

SEQ ID NO: 158931 - RNA, 22 nt, synthetic construct
  source 1..22: mol_type = other RNA
tttggctagaagcatctgatac

SEQ ID NO: 158932 - RNA, 22 nt, synthetic construct
  source 1..22: mol_type = other RNA
tttggctcaatggttaagactg

SEQ ID NO: 158933 - RNA, 22 nt, synthetic construct
  source 1..22: mol_type = other RNA
tttggctcccatgattcaaaat

SEQ ID NO: 158934 - RNA, 22 nt, synthetic construct
  source 1..22: mol_type = other RNA
tttggctccttaccactataat

SEQ ID NO: 158935 - RNA, 22 nt, synthetic construct
  source 1..22: mol_type = other RNA
tttggctgaaatgctgtaactg

SEQ ID NO: 158936 - RNA, 22 nt, synthetic construct
  source 1..22: mol_type = other RNA
tttggctgggagcttatcaggc

SEQ ID NO: 158937 - RNA, 22 nt, synthetic construct
  source 1..22: mol_type = other RNA
tttggctgttaccatttgacct

SEQ ID NO: 158938 - RNA, 22 nt, synthetic construct
  source 1..22: mol_type = other RNA
tttggctgttagccttgccatt

SEQ ID NO: 158939 - RNA, 22 nt, synthetic construct
  source 1..22: mol_type = other RNA
tttggcttggggaacagtttag

SEQ ID NO: 158940 - RNA, 22 nt, synthetic construct
  source 1..22: mol_type = other RNA
tttgggaaaatctctgacttca

SEQ ID NO: 158941 - RNA, 22 nt, synthetic construct
  source 1..22: mol_type = other RNA
tttgggaaggatggccagtcat

SEQ ID NO: 158942 - RNA, 22 nt, synthetic construct
  source 1..22: mol_type = other RNA
tttgggaaggccctgattgaga

SEQ ID NO: 158943 - RNA, 22 nt, synthetic construct
  source 1..22: mol_type = other RNA
tttgggaatgtggtcacacttt

SEQ ID NO: 158944 - RNA, 22 nt, synthetic construct
  source 1..22: mol_type = other RNA
tttgggactgagacagtattgt

SEQ ID NO: 158945 - RNA, 22 nt, synthetic construct
  source 1..22: mol_type = other RNA
tttgggaggctgaggcggaagg

SEQ ID NO: 158946 - RNA, 22 nt, synthetic construct
  source 1..22: mol_type = other RNA
tttgggatatagctacaatgat

SEQ ID NO: 158947 - RNA, 22 nt, synthetic construct
  source 1..22: mol_type = other RNA
tttgggatcacacttgatggtt

SEQ ID NO: 158948 - RNA, 22 nt, synthetic construct
  source 1..22: mol_type = other RNA
tttgggatctgtcatgtttgaa

SEQ ID NO: 158949 - RNA, 22 nt, synthetic construct
  source 1..22: mol_type = other RNA
tttgggattagcttattctttt

SEQ ID NO: 158950 - RNA, 22 nt, synthetic construct
  source 1..22: mol_type = other RNA
tttgggcctttctgtttgtttg

SEQ ID NO: 158951 - RNA, 22 nt, synthetic construct
  source 1..22: mol_type = other RNA
tttggggagataccttgaaagg

SEQ ID NO: 158952 - RNA, 22 nt, synthetic construct
  source 1..22: mol_type = other RNA
tttggggattctgctactagca

SEQ ID NO: 158953 - RNA, 22 nt, synthetic construct
  source 1..22: mol_type = other RNA
tttggggccatctgaattcaag

SEQ ID NO: 158954 - RNA, 22 nt, synthetic construct
  source 1..22: mol_type = other RNA
tttggggctaggatttcagtaa

SEQ ID NO: 158955 - RNA, 22 nt, synthetic construct
  source 1..22: mol_type = other RNA
tttggggcttttgaacactctg

SEQ ID NO: 158956 - RNA, 22 nt, synthetic construct
  source 1..22: mol_type = other RNA
tttgggggaagagagcattgcc

SEQ ID NO: 158957 - RNA, 22 nt, synthetic construct
  source 1..22: mol_type = other RNA
tttgggggaagcaggaactcat

SEQ ID NO: 158958 - RNA, 22 nt, synthetic construct
  source 1..22: mol_type = other RNA
tttgggtaatttatctccataa

SEQ ID NO: 158959 - RNA, 22 nt, synthetic construct
  source 1..22: mol_type = other RNA
tttgggtctatagtttaattgg

SEQ ID NO: 158960 - RNA, 22 nt, synthetic construct
  source 1..22: mol_type = other RNA
tttgggtgacagagagagacct

SEQ ID NO: 158961 - RNA, 22 nt, synthetic construct
  source 1..22: mol_type = other RNA
tttgggtttgagtttccagaaa

SEQ ID NO: 158962 - RNA, 22 nt, synthetic construct
  source 1..22: mol_type = other RNA
tttggtaaaatgtggcaaattt

SEQ ID NO: 158963 - RNA, 22 nt, synthetic construct
  source 1..22: mol_type = other RNA
tttggtaatgggaaagacaggt

SEQ ID NO: 158964 - RNA, 22 nt, synthetic construct
  source 1..22: mol_type = other RNA
tttggtagaggattccaggttt

SEQ ID NO: 158965 - RNA, 22 nt, synthetic construct
  source 1..22: mol_type = other RNA
tttggtagataccagacccttt

SEQ ID NO: 158966 - RNA, 22 nt, synthetic construct
  source 1..22: mol_type = other RNA
tttggtagatttctgcatagag

SEQ ID NO: 158967 - RNA, 22 nt, synthetic construct
  source 1..22: mol_type = other RNA
tttggtaggccaaggcgggagg

SEQ ID NO: 158968 - RNA, 22 nt, synthetic construct
  source 1..22: mol_type = other RNA
tttggtatgttgtgttttcatt

SEQ ID NO: 158969 - RNA, 22 nt, synthetic construct
  source 1..22: mol_type = other RNA
tttggtattcttatccctacct

SEQ ID NO: 158970 - RNA, 22 nt, synthetic construct
  source 1..22: mol_type = other RNA
tttggtattttttagagacagg

SEQ ID NO: 158971 - RNA, 22 nt, synthetic construct
  source 1..22: mol_type = other RNA
tttggtcaaaactgtattttct

SEQ ID NO: 158972 - RNA, 22 nt, synthetic construct
  source 1..22: mol_type = other RNA
tttggtcaattgatctgccagg

SEQ ID NO: 158973 - RNA, 22 nt, synthetic construct
  source 1..22: mol_type = other RNA
tttggtctcattcactagacac

SEQ ID NO: 158974 - RNA, 22 nt, synthetic construct
  source 1..22: mol_type = other RNA
tttggtcttaccctctagctcc

SEQ ID NO: 158975 - RNA, 22 nt, synthetic construct
  source 1..22: mol_type = other RNA
tttggtgaaggttcatgaacat

SEQ ID NO: 158976 - RNA, 22 nt, synthetic construct
  source 1..22: mol_type = other RNA
tttggtgactgaattcccacaa

SEQ ID NO: 158977 - RNA, 22 nt, synthetic construct
  source 1..22: mol_type = other RNA
tttggtgatcctaagccatcta

SEQ ID NO: 158978 - RNA, 22 nt, synthetic construct
  source 1..22: mol_type = other RNA
tttggtgctgataaatggcttt

SEQ ID NO: 158979 - RNA, 22 nt, synthetic construct
  source 1..22: mol_type = other RNA
tttggtgtgtgcaaaggattag

SEQ ID NO: 158980 - RNA, 22 nt, synthetic construct
  source 1..22: mol_type = other RNA
tttggtgtttttctaggtagtt

SEQ ID NO: 158981 - RNA, 22 nt, synthetic construct
  source 1..22: mol_type = other RNA
tttggttatgcgaatttacttt

SEQ ID NO: 158982 - RNA, 22 nt, synthetic construct
  source 1..22: mol_type = other RNA
tttggttcacttgaaacctgcc

SEQ ID NO: 158983 - RNA, 22 nt, synthetic construct
  source 1..22: mol_type = other RNA
tttggttcatttcaggaatgca

SEQ ID NO: 158984 - RNA, 22 nt, synthetic construct
  source 1..22: mol_type = other RNA
tttggtttgtatgtgttaaacc

SEQ ID NO: 158985 - RNA, 22 nt, synthetic construct
  source 1..22: mol_type = other RNA
tttggttttactactgtactgt

SEQ ID NO: 158986 - RNA, 22 nt, synthetic construct
  source 1..22: mol_type = other RNA
tttggttttgactcagtacttc

SEQ ID NO: 158987 - RNA, 22 nt, synthetic construct
  source 1..22: mol_type = other RNA
tttggtttttatggaataatgg

SEQ ID NO: 158988 - RNA, 22 nt, synthetic construct
  source 1..22: mol_type = other RNA
tttgtaaatgaaacacttgtgt

SEQ ID NO: 158989 - RNA, 22 nt, synthetic construct
  source 1..22: mol_type = other RNA
tttgtaacatgttagattagga

SEQ ID NO: 158990 - RNA, 22 nt, synthetic construct
  source 1..22: mol_type = other RNA
tttgtaacgtgtatagcttttt

SEQ ID NO: 158991 - RNA, 22 nt, synthetic construct
  source 1..22: mol_type = other RNA
tttgtaacttgttcatgtttac

SEQ ID NO: 158992 - RNA, 22 nt, synthetic construct
  source 1..22: mol_type = other RNA
tttgtaataacttggagaactt

SEQ ID NO: 158993 - RNA, 22 nt, synthetic construct
  source 1..22: mol_type = other RNA
tttgtaatctaaggattatggc

SEQ ID NO: 158994 - RNA, 22 nt, synthetic construct
  source 1..22: mol_type = other RNA
tttgtaattcatcctactagta

SEQ ID NO: 158995 - RNA, 22 nt, synthetic construct
  source 1..22: mol_type = other RNA
tttgtacagtaattgtagtttc

SEQ ID NO: 158996 - RNA, 22 nt, synthetic construct
  source 1..22: mol_type = other RNA
tttgtactacttgtcaggtggg

SEQ ID NO: 158997 - RNA, 22 nt, synthetic construct
  source 1..22: mol_type = other RNA
tttgtacttctaccttgaaaat

SEQ ID NO: 158998 - RNA, 22 nt, synthetic construct
  source 1..22: mol_type = other RNA
tttgtagaccctgttagtcccc

SEQ ID NO: 158999 - RNA, 22 nt, synthetic construct
  source 1..22: mol_type = other RNA
tttgtagagacagaatcttact

SEQ ID NO: 159000 - RNA, 22 nt, synthetic construct
  source 1..22: mol_type = other RNA
tttgtagagcaagcaacaccag

SEQ ID NO: 159001 - RNA, 22 nt, synthetic construct
  source 1..22: mol_type = other RNA
tttgtagagggaatttgtttta

SEQ ID NO: 159002 - RNA, 22 nt, synthetic construct
  source 1..22: mol_type = other RNA
tttgtagctaatatctttgggg

SEQ ID NO: 159003 - RNA, 22 nt, synthetic construct
  source 1..22: mol_type = other RNA
tttgtagctcaaagcatatgaa

SEQ ID NO: 159004 - RNA, 22 nt, synthetic construct
  source 1..22: mol_type = other RNA
tttgtagtgtcttaatcctatt

SEQ ID NO: 159005 - RNA, 22 nt, synthetic construct
  source 1..22: mol_type = other RNA
tttgtataaattactgtctgtg

SEQ ID NO: 159006 - RNA, 22 nt, synthetic construct
  source 1..22: mol_type = other RNA
tttgtatatggtttaaggtaag

SEQ ID NO: 159007 - RNA, 22 nt, synthetic construct
  source 1..22: mol_type = other RNA
tttgtatcctgagacttaggca

SEQ ID NO: 159008 - RNA, 22 nt, synthetic construct
  source 1..22: mol_type = other RNA
tttgtatcctgtttgagaagtc

SEQ ID NO: 159009 - RNA, 22 nt, synthetic construct
  source 1..22: mol_type = other RNA
tttgtatcttcacaaacaaatc

SEQ ID NO: 159010 - RNA, 22 nt, synthetic construct
  source 1..22: mol_type = other RNA
tttgtatgtgttaaaccattct

SEQ ID NO: 159011 - RNA, 22 nt, synthetic construct
  source 1..22: mol_type = other RNA
tttgtattatttctgtcatctg

SEQ ID NO: 159012 - RNA, 22 nt, synthetic construct
  source 1..22: mol_type = other RNA
tttgtattcatccagtttaaag

SEQ ID NO: 159013 - RNA, 22 nt, synthetic construct
  source 1..22: mol_type = other RNA
tttgtattctgacctaaagttt

SEQ ID NO: 159014 - RNA, 22 nt, synthetic construct
  source 1..22: mol_type = other RNA
tttgtcaacttttagtaggtct

SEQ ID NO: 159015 - RNA, 22 nt, synthetic construct
  source 1..22: mol_type = other RNA
tttgtcaagctatcagaatttt

SEQ ID NO: 159016 - RNA, 22 nt, synthetic construct
  source 1..22: mol_type = other RNA
tttgtcaagtgactccaagcac

SEQ ID NO: 159017 - RNA, 22 nt, synthetic construct
  source 1..22: mol_type = other RNA
tttgtcacacggaaaacattat

SEQ ID NO: 159018 - RNA, 22 nt, synthetic construct
  source 1..22: mol_type = other RNA
tttgtcacatagaagcgctctt

SEQ ID NO: 159019 - RNA, 22 nt, synthetic construct
  source 1..22: mol_type = other RNA
tttgtcaggcatgctaactgca

SEQ ID NO: 159020 - RNA, 22 nt, synthetic construct
  source 1..22: mol_type = other RNA
tttgtccaccagacaaaaatag

SEQ ID NO: 159021 - RNA, 22 nt, synthetic construct
  source 1..22: mol_type = other RNA
tttgtccactgtcagtgggact

SEQ ID NO: 159022 - RNA, 22 nt, synthetic construct
  source 1..22: mol_type = other RNA
tttgtccatctggattatagtg

SEQ ID NO: 159023 - RNA, 22 nt, synthetic construct
  source 1..22: mol_type = other RNA
tttgtctattccctacattgcc

SEQ ID NO: 159024 - RNA, 22 nt, synthetic construct
  source 1..22: mol_type = other RNA
tttgtctcccgggttcaagcga

SEQ ID NO: 159025 - RNA, 22 nt, synthetic construct
  source 1..22: mol_type = other RNA
tttgtctctggaaggctaagca

SEQ ID NO: 159026 - RNA, 22 nt, synthetic construct
  source 1..22: mol_type = other RNA
tttgtctggaacacacattagc

SEQ ID NO: 159027 - RNA, 22 nt, synthetic construct
  source 1..22: mol_type = other RNA
tttgtctggtggacaaaaaacg

SEQ ID NO: 159028 - RNA, 22 nt, synthetic construct
  source 1..22: mol_type = other RNA
tttgtgaaccttgaagtacttc

SEQ ID NO: 159029 - RNA, 22 nt, synthetic construct
  source 1..22: mol_type = other RNA
tttgtgaagggaggtaggctta

SEQ ID NO: 159030 - RNA, 22 nt, synthetic construct
  source 1..22: mol_type = other RNA
tttgtgacaagttcagcatctt

SEQ ID NO: 159031 - RNA, 22 nt, synthetic construct
  source 1..22: mol_type = other RNA
tttgtgaccagatcaaacgtgc

SEQ ID NO: 159032 - RNA, 22 nt, synthetic construct
  source 1..22: mol_type = other RNA
tttgtgactgtgagggtaagaa

SEQ ID NO: 159033 - RNA, 22 nt, synthetic construct
  source 1..22: mol_type = other RNA
tttgtgagttttaactcttgca

SEQ ID NO: 159034 - RNA, 22 nt, synthetic construct
  source 1..22: mol_type = other RNA
tttgtgcaacataaatagggtg

SEQ ID NO: 159035 - RNA, 22 nt, synthetic construct
  source 1..22: mol_type = other RNA
tttgtgcaggtctgggtttttt

SEQ ID NO: 159036 - RNA, 22 nt, synthetic construct
  source 1..22: mol_type = other RNA
tttgtgcatactgtgatgattt

SEQ ID NO: 159037 - RNA, 22 nt, synthetic construct
  source 1..22: mol_type = other RNA
tttgtgcatcaaaggacactat

SEQ ID NO: 159038 - RNA, 22 nt, synthetic construct
  source 1..22: mol_type = other RNA
tttgtgcttggatattctacag

SEQ ID NO: 159039 - RNA, 22 nt, synthetic construct
  source 1..22: mol_type = other RNA
tttgtggagatggggacttgct

SEQ ID NO: 159040 - RNA, 22 nt, synthetic construct
  source 1..22: mol_type = other RNA
tttgtggagtggaggggcagga

SEQ ID NO: 159041 - RNA, 22 nt, synthetic construct
  source 1..22: mol_type = other RNA
tttgtggcatctttgttacagc

SEQ ID NO: 159042 - RNA, 22 nt, synthetic construct
  source 1..22: mol_type = other RNA
tttgtggcctcttcccttgtgc

SEQ ID NO: 159043 - RNA, 22 nt, synthetic construct
  source 1..22: mol_type = other RNA
tttgtgggaattcagtcaccaa

SEQ ID NO: 159044 - RNA, 22 nt, synthetic construct
  source 1..22: mol_type = other RNA
tttgtggttttaacctcttgaa

SEQ ID NO: 159045 - RNA, 22 nt, synthetic construct
  source 1..22: mol_type = other RNA
tttgtgtagaggtgaagttaag

SEQ ID NO: 159046 - RNA, 22 nt, synthetic construct
  source 1..22: mol_type = other RNA
tttgtgtcaagtacaactaata

SEQ ID NO: 159047 - RNA, 22 nt, synthetic construct
  source 1..22: mol_type = other RNA
tttgtgtcttctgtttttctta

SEQ ID NO: 159048 - RNA, 22 nt, synthetic construct
  source 1..22: mol_type = other RNA
tttgtgtgtttgtgaaaaatac

SEQ ID NO: 159049 - RNA, 22 nt, synthetic construct
  source 1..22: mol_type = other RNA
tttgtgttggtgtttctgacag

SEQ ID NO: 159050 - RNA, 22 nt, synthetic construct
  source 1..22: mol_type = other RNA
tttgtgtttgtgaccagatcaa

SEQ ID NO: 159051 - RNA, 22 nt, synthetic construct
  source 1..22: mol_type = other RNA
tttgtgttttcactctcaatag

SEQ ID NO: 159052 - RNA, 22 nt, synthetic construct
  source 1..22: mol_type = other RNA
tttgttacagcagctctagcaa

SEQ ID NO: 159053 - RNA, 22 nt, synthetic construct
  source 1..22: mol_type = other RNA
tttgttactgatctgctcaagt

SEQ ID NO: 159054 - RNA, 22 nt, synthetic construct
  source 1..22: mol_type = other RNA
tttgttagatctgggataatgc

SEQ ID NO: 159055 - RNA, 22 nt, synthetic construct
  source 1..22: mol_type = other RNA
tttgttagtgccttcagaagga

SEQ ID NO: 159056 - RNA, 22 nt, synthetic construct
  source 1..22: mol_type = other RNA
tttgttatctgaacgtctttaa

SEQ ID NO: 159057 - RNA, 22 nt, synthetic construct
  source 1..22: mol_type = other RNA
tttgttatggtaggtgcttttt

SEQ ID NO: 159058 - RNA, 22 nt, synthetic construct
  source 1..22: mol_type = other RNA
tttgttcaagcgctgaagtact

SEQ ID NO: 159059 - RNA, 22 nt, synthetic construct
  source 1..22: mol_type = other RNA
tttgttcagaaatagactccca

SEQ ID NO: 159060 - RNA, 22 nt, synthetic construct
  source 1..22: mol_type = other RNA
tttgttcaggagttttgcctct

SEQ ID NO: 159061 - RNA, 22 nt, synthetic construct
  source 1..22: mol_type = other RNA
tttgttcatcatcttttgcctg

SEQ ID NO: 159062 - RNA, 22 nt, synthetic construct
  source 1..22: mol_type = other RNA
tttgttcattcatctgttaatg

SEQ ID NO: 159063 - RNA, 22 nt, synthetic construct
  source 1..22: mol_type = other RNA
tttgttctaatttgtgaacctt

SEQ ID NO: 159064 - RNA, 22 nt, synthetic construct
  source 1..22: mol_type = other RNA
tttgttctcgttcatgttcaag

SEQ ID NO: 159065 - RNA, 22 nt, synthetic construct
  source 1..22: mol_type = other RNA
tttgttctgctgttgatggacg

SEQ ID NO: 159066 - RNA, 22 nt, synthetic construct
  source 1..22: mol_type = other RNA
tttgttctgtcacatttgaaag

SEQ ID NO: 159067 - RNA, 22 nt, synthetic construct
  source 1..22: mol_type = other RNA
tttgttctgtcacggtgcccta

SEQ ID NO: 159068 - RNA, 22 nt, synthetic construct
  source 1..22: mol_type = other RNA
tttgttgaaaacgaggaaaaga

SEQ ID NO: 159069 - RNA, 22 nt, synthetic construct
  source 1..22: mol_type = other RNA
tttgttgacatcctttgcgtct

SEQ ID NO: 159070 - RNA, 22 nt, synthetic construct
  source 1..22: mol_type = other RNA
tttgttgacccaatcatgttct

SEQ ID NO: 159071 - RNA, 22 nt, synthetic construct
  source 1..22: mol_type = other RNA
tttgttgcatccccattcaatt

SEQ ID NO: 159072 - RNA, 22 nt, synthetic construct
  source 1..22: mol_type = other RNA
tttgttgccaggtggacgcggc

SEQ ID NO: 159073 - RNA, 22 nt, synthetic construct
  source 1..22: mol_type = other RNA
tttgttgcctgtagttttggtg

SEQ ID NO: 159074 - RNA, 22 nt, synthetic construct
  source 1..22: mol_type = other RNA
tttgttgctattgttgaattgt

SEQ ID NO: 159075 - RNA, 22 nt, synthetic construct
  source 1..22: mol_type = other RNA
tttgttgggtttaactgaggtg

SEQ ID NO: 159076 - RNA, 22 nt, synthetic construct
  source 1..22: mol_type = other RNA
tttgttgttggtttgtgtgttt

SEQ ID NO: 159077 - RNA, 22 nt, synthetic construct
  source 1..22: mol_type = other RNA
tttgttgttgttgtttctgagc

SEQ ID NO: 159078 - RNA, 22 nt, synthetic construct
  source 1..22: mol_type = other RNA
tttgtttaattagccgggtgta

SEQ ID NO: 159079 - RNA, 22 nt, synthetic construct
  source 1..22: mol_type = other RNA
tttgtttagtagctgtctttaa

SEQ ID NO: 159080 - RNA, 22 nt, synthetic construct
  source 1..22: mol_type = other RNA
tttgtttatccttgcaccaact

SEQ ID NO: 159081 - RNA, 22 nt, synthetic construct
  source 1..22: mol_type = other RNA
tttgtttatttgctgtcaggca

SEQ ID NO: 159082 - RNA, 22 nt, synthetic construct
  source 1..22: mol_type = other RNA
tttgtttctgaggtggagttct

SEQ ID NO: 159083 - RNA, 22 nt, synthetic construct
  source 1..22: mol_type = other RNA
tttgtttgaattaagcaccact

SEQ ID NO: 159084 - RNA, 22 nt, synthetic construct
  source 1..22: mol_type = other RNA
tttgtttgctagagctgctgta

SEQ ID NO: 159085 - RNA, 22 nt, synthetic construct
  source 1..22: mol_type = other RNA
tttgtttgtttctgaggtggag

SEQ ID NO: 159086 - RNA, 22 nt, synthetic construct
  source 1..22: mol_type = other RNA
tttgttttaccatctaaagcca

SEQ ID NO: 159087 - RNA, 22 nt, synthetic construct
  source 1..22: mol_type = other RNA
tttgttttccaagccttaaaag

SEQ ID NO: 159088 - RNA, 22 nt, synthetic construct
  source 1..22: mol_type = other RNA
tttgttttctccttctggaaga

SEQ ID NO: 159089 - RNA, 22 nt, synthetic construct
  source 1..22: mol_type = other RNA
tttgttttggtcaaaactgtat

SEQ ID NO: 159090 - RNA, 22 nt, synthetic construct
  source 1..22: mol_type = other RNA
tttgttttgtgtttgtgaccag

SEQ ID NO: 159091 - RNA, 22 nt, synthetic construct
  source 1..22: mol_type = other RNA
tttgttttgtttttctctcctt

SEQ ID NO: 159092 - RNA, 22 nt, synthetic construct
  source 1..22: mol_type = other RNA
tttgtttttctctccttgcaca

SEQ ID NO: 159093 - RNA, 22 nt, synthetic construct
  source 1..22: mol_type = other RNA
tttgttttttcacagaaacaga

SEQ ID NO: 159094 - RNA, 22 nt, synthetic construct
  source 1..22: mol_type = other RNA
ttttaaaaactttttgggcctt

SEQ ID NO: 159095 - RNA, 22 nt, synthetic construct
  source 1..22: mol_type = other RNA
ttttaaaaagcagctacctgtt

SEQ ID NO: 159096 - RNA, 22 nt, synthetic construct
  source 1..22: mol_type = other RNA
ttttaaaagagcgaagagggag

SEQ ID NO: 159097 - RNA, 22 nt, synthetic construct
  source 1..22: mol_type = other RNA
ttttaaaagatgcattctgtca

SEQ ID NO: 159098 - RNA, 22 nt, synthetic construct
  source 1..22: mol_type = other RNA
ttttaaaagtcagctaggcgta

SEQ ID NO: 159099 - RNA, 22 nt, synthetic construct
  source 1..22: mol_type = other RNA
ttttaaacaggtgtaagagatt

SEQ ID NO: 159100 - RNA, 22 nt, synthetic construct
  source 1..22: mol_type = other RNA
ttttaaacccatttcatgccat

SEQ ID NO: 159101 - RNA, 22 nt, synthetic construct
  source 1..22: mol_type = other RNA
ttttaaagaaaggtctctctct

SEQ ID NO: 159102 - RNA, 22 nt, synthetic construct
  source 1..22: mol_type = other RNA
ttttaaagacctcaggtttaga

SEQ ID NO: 159103 - RNA, 22 nt, synthetic construct
  source 1..22: mol_type = other RNA
ttttaaagcagggaggggtccc

SEQ ID NO: 159104 - RNA, 22 nt, synthetic construct
  source 1..22: mol_type = other RNA
ttttaaagggataatgctatcc

SEQ ID NO: 159105 - RNA, 22 nt, synthetic construct
  source 1..22: mol_type = other RNA
ttttaaatcagcaccatctaac

SEQ ID NO: 159106 - RNA, 22 nt, synthetic construct
  source 1..22: mol_type = other RNA
ttttaaatgccaatttgggata

SEQ ID NO: 159107 - RNA, 22 nt, synthetic construct
  source 1..22: mol_type = other RNA
ttttaaatgttttgcagagatg

SEQ ID NO: 159108 - RNA, 22 nt, synthetic construct
  source 1..22: mol_type = other RNA
ttttaacagatggtcctttttt

SEQ ID NO: 159109 - RNA, 22 nt, synthetic construct
  source 1..22: mol_type = other RNA
ttttaacccacagataatttct

SEQ ID NO: 159110 - RNA, 22 nt, synthetic construct
  source 1..22: mol_type = other RNA
ttttaacctcttgaagtcagtt

SEQ ID NO: 159111 - RNA, 22 nt, synthetic construct
  source 1..22: mol_type = other RNA
ttttaactcttgcattagagcc

SEQ ID NO: 159112 - RNA, 22 nt, synthetic construct
  source 1..22: mol_type = other RNA
ttttaacttgctttgaatttgg

SEQ ID NO: 159113 - RNA, 22 nt, synthetic construct
  source 1..22: mol_type = other RNA
ttttaagaaaagaagttacggt

SEQ ID NO: 159114 - RNA, 22 nt, synthetic construct
  source 1..22: mol_type = other RNA
ttttaagagtgaagaaaccttt

SEQ ID NO: 159115 - RNA, 22 nt, synthetic construct
  source 1..22: mol_type = other RNA
ttttaagattctctttagggaa

SEQ ID NO: 159116 - RNA, 22 nt, synthetic construct
  source 1..22: mol_type = other RNA
ttttaagcctagagattaggca

SEQ ID NO: 159117 - RNA, 22 nt, synthetic construct
  source 1..22: mol_type = other RNA
ttttaaggcagggcttggtggc

SEQ ID NO: 159118 - RNA, 22 nt, synthetic construct
  source 1..22: mol_type = other RNA
ttttaaggctaaaacatacatg

SEQ ID NO: 159119 - RNA, 22 nt, synthetic construct
  source 1..22: mol_type = other RNA
ttttaaggctgaacaatattcc

SEQ ID NO: 159120 - RNA, 22 nt, synthetic construct
  source 1..22: mol_type = other RNA
ttttaaggcttggaaaacaaat

SEQ ID NO: 159121 - RNA, 22 nt, synthetic construct
  source 1..22: mol_type = other RNA
ttttaagggaaacactcatacc

SEQ ID NO: 159122 - RNA, 22 nt, synthetic construct
  source 1..22: mol_type = other RNA
ttttaagtgcacaatgcagtat

SEQ ID NO: 159123 - RNA, 22 nt, synthetic construct
  source 1..22: mol_type = other RNA
ttttaagtggcgctgtttgcct

SEQ ID NO: 159124 - RNA, 22 nt, synthetic construct
  source 1..22: mol_type = other RNA
ttttaagttctagggaacatgt

SEQ ID NO: 159125 - RNA, 22 nt, synthetic construct
  source 1..22: mol_type = other RNA
ttttaataagcttcgaagcaaa

SEQ ID NO: 159126 - RNA, 22 nt, synthetic construct
  source 1..22: mol_type = other RNA
ttttaatcgaatcctcacaaca

SEQ ID NO: 159127 - RNA, 22 nt, synthetic construct
  source 1..22: mol_type = other RNA
ttttaatctacaaaacagggtt

SEQ ID NO: 159128 - RNA, 22 nt, synthetic construct
  source 1..22: mol_type = other RNA
ttttaatctgtcctgaatacta

SEQ ID NO: 159129 - RNA, 22 nt, synthetic construct
  source 1..22: mol_type = other RNA
ttttaatgggcattagaagtta

SEQ ID NO: 159130 - RNA, 22 nt, synthetic construct
  source 1..22: mol_type = other RNA
ttttaatgtagatcctgaggaa

SEQ ID NO: 159131 - RNA, 22 nt, synthetic construct
  source 1..22: mol_type = other RNA
ttttacacatgtcagccacaag

SEQ ID NO: 159132 - RNA, 22 nt, synthetic construct
  source 1..22: mol_type = other RNA
ttttacaccatgcaggttcatg

SEQ ID NO: 159133 - RNA, 22 nt, synthetic construct
  source 1..22: mol_type = other RNA
ttttacaccctaggtagggttg

SEQ ID NO: 159134 - RNA, 22 nt, synthetic construct
  source 1..22: mol_type = other RNA
ttttacacttggagttttcccc

SEQ ID NO: 159135 - RNA, 22 nt, synthetic construct
  source 1..22: mol_type = other RNA
ttttacatgtagttttccctgt

SEQ ID NO: 159136 - RNA, 22 nt, synthetic construct
  source 1..22: mol_type = other RNA
ttttacattaaagacagctact

SEQ ID NO: 159137 - RNA, 22 nt, synthetic construct
  source 1..22: mol_type = other RNA
ttttaccaaaacagcttcttgt

SEQ ID NO: 159138 - RNA, 22 nt, synthetic construct
  source 1..22: mol_type = other RNA
ttttaccaaggctaagttgaga

SEQ ID NO: 159139 - RNA, 22 nt, synthetic construct
  source 1..22: mol_type = other RNA
ttttaccaagttgaatttctgt

SEQ ID NO: 159140 - RNA, 22 nt, synthetic construct
  source 1..22: mol_type = other RNA
ttttaccatctaaagccaggct

SEQ ID NO: 159141 - RNA, 22 nt, synthetic construct
  source 1..22: mol_type = other RNA
ttttacccaacatgagagaaaa

SEQ ID NO: 159142 - RNA, 22 nt, synthetic construct
  source 1..22: mol_type = other RNA
ttttacccggagaggtgaacta

SEQ ID NO: 159143 - RNA, 22 nt, synthetic construct
  source 1..22: mol_type = other RNA
ttttacccgtggaaatacttga

SEQ ID NO: 159144 - RNA, 22 nt, synthetic construct
  source 1..22: mol_type = other RNA
ttttaccctcattttataaggg

SEQ ID NO: 159145 - RNA, 22 nt, synthetic construct
  source 1..22: mol_type = other RNA
ttttacgaggacagactgcagt

SEQ ID NO: 159146 - RNA, 22 nt, synthetic construct
  source 1..22: mol_type = other RNA
ttttacgatgaaattgaccatt

SEQ ID NO: 159147 - RNA, 22 nt, synthetic construct
  source 1..22: mol_type = other RNA
ttttactactgtactgtttagc

SEQ ID NO: 159148 - RNA, 22 nt, synthetic construct
  source 1..22: mol_type = other RNA
ttttactcatgtctacctgtct

SEQ ID NO: 159149 - RNA, 22 nt, synthetic construct
  source 1..22: mol_type = other RNA
ttttactcgagggtagcttttc

SEQ ID NO: 159150 - RNA, 22 nt, synthetic construct
  source 1..22: mol_type = other RNA
ttttactgatcttttctgacaa

SEQ ID NO: 159151 - RNA, 22 nt, synthetic construct
  source 1..22: mol_type = other RNA
ttttactgctatacaaccggaa

SEQ ID NO: 159152 - RNA, 22 nt, synthetic construct
  source 1..22: mol_type = other RNA
ttttactgtccaaacagtgacc

SEQ ID NO: 159153 - RNA, 22 nt, synthetic construct
  source 1..22: mol_type = other RNA
ttttacttactagttgtgctac

SEQ ID NO: 159154 - RNA, 22 nt, synthetic construct
  source 1..22: mol_type = other RNA
ttttacttgcttggtttcacac

SEQ ID NO: 159155 - RNA, 22 nt, synthetic construct
  source 1..22: mol_type = other RNA
ttttacttggctcctcccggct

SEQ ID NO: 159156 - RNA, 22 nt, synthetic construct
  source 1..22: mol_type = other RNA
ttttactttgcgaaacacactc

SEQ ID NO: 159157 - RNA, 22 nt, synthetic construct
  source 1..22: mol_type = other RNA
ttttagaaggtaagaatgtcaa

SEQ ID NO: 159158 - RNA, 22 nt, synthetic construct
  source 1..22: mol_type = other RNA
ttttagagagatgcctgtgctt

SEQ ID NO: 159159 - RNA, 22 nt, synthetic construct
  source 1..22: mol_type = other RNA
ttttagagtaactgtcatcagc

SEQ ID NO: 159160 - RNA, 22 nt, synthetic construct
  source 1..22: mol_type = other RNA
ttttagatcaagtcctttccag

SEQ ID NO: 159161 - RNA, 22 nt, synthetic construct
  source 1..22: mol_type = other RNA
ttttagccaacaaccataatga

SEQ ID NO: 159162 - RNA, 22 nt, synthetic construct
  source 1..22: mol_type = other RNA
ttttagctggggcagcaaagca

SEQ ID NO: 159163 - RNA, 22 nt, synthetic construct
  source 1..22: mol_type = other RNA
ttttagcttcatataagtggaa

SEQ ID NO: 159164 - RNA, 22 nt, synthetic construct
  source 1..22: mol_type = other RNA
ttttaggaaaatagagttccat

SEQ ID NO: 159165 - RNA, 22 nt, synthetic construct
  source 1..22: mol_type = other RNA
ttttaggacaaggaaaggatgg

SEQ ID NO: 159166 - RNA, 22 nt, synthetic construct
  source 1..22: mol_type = other RNA
ttttaggagtcaactaatcaaa

SEQ ID NO: 159167 - RNA, 22 nt, synthetic construct
  source 1..22: mol_type = other RNA
ttttaggctctgtggtttcttg

SEQ ID NO: 159168 - RNA, 22 nt, synthetic construct
  source 1..22: mol_type = other RNA
ttttaggggggaaaacaccctt

SEQ ID NO: 159169 - RNA, 22 nt, synthetic construct
  source 1..22: mol_type = other RNA
ttttaggtagggataagaatac

SEQ ID NO: 159170 - RNA, 22 nt, synthetic construct
  source 1..22: mol_type = other RNA
ttttaggtagtcttgtcataac

SEQ ID NO: 159171 - RNA, 22 nt, synthetic construct
  source 1..22: mol_type = other RNA
ttttaggtcatttttcacttct

SEQ ID NO: 159172 - RNA, 22 nt, synthetic construct
  source 1..22: mol_type = other RNA
ttttaggtgccccactccacac

SEQ ID NO: 159173 - RNA, 22 nt, synthetic construct
  source 1..22: mol_type = other RNA
ttttagtaagaggtatcaccat

SEQ ID NO: 159174 - RNA, 22 nt, synthetic construct
  source 1..22: mol_type = other RNA
ttttagtaattctccactttca

SEQ ID NO: 159175 - RNA, 22 nt, synthetic construct
  source 1..22: mol_type = other RNA
ttttagtagagatgaggtttta

SEQ ID NO: 159176 - RNA, 22 nt, synthetic construct
  source 1..22: mol_type = other RNA
ttttagtaggtctccttgtatg

SEQ ID NO: 159177 - RNA, 22 nt, synthetic construct
  source 1..22: mol_type = other RNA
ttttagtagtaagttgtgtcat

SEQ ID NO: 159178 - RNA, 22 nt, synthetic construct
  source 1..22: mol_type = other RNA
ttttagtgactggcttaatgca

SEQ ID NO: 159179 - RNA, 22 nt, synthetic construct
  source 1..22: mol_type = other RNA
ttttagtggctcacagtgctcc

SEQ ID NO: 159180 - RNA, 22 nt, synthetic construct
  source 1..22: mol_type = other RNA
ttttagtttacactatggcttt

SEQ ID NO: 159181 - RNA, 22 nt, synthetic construct
  source 1..22: mol_type = other RNA
ttttataagggtgataaaaagg

SEQ ID NO: 159182 - RNA, 22 nt, synthetic construct
  source 1..22: mol_type = other RNA
ttttataatgggcaatcagaaa

SEQ ID NO: 159183 - RNA, 22 nt, synthetic construct
  source 1..22: mol_type = other RNA
ttttatagtcttagctcttaag

SEQ ID NO: 159184 - RNA, 22 nt, synthetic construct
  source 1..22: mol_type = other RNA
ttttatatgcattaagccagtc

SEQ ID NO: 159185 - RNA, 22 nt, synthetic construct
  source 1..22: mol_type = other RNA
ttttatatttccgatgatacct

SEQ ID NO: 159186 - RNA, 22 nt, synthetic construct
  source 1..22: mol_type = other RNA
ttttatcaaaatcaaggtgcgg

SEQ ID NO: 159187 - RNA, 22 nt, synthetic construct
  source 1..22: mol_type = other RNA
ttttatcaattagttcctcctt

SEQ ID NO: 159188 - RNA, 22 nt, synthetic construct
  source 1..22: mol_type = other RNA
ttttatctctctcaagcaatct

SEQ ID NO: 159189 - RNA, 22 nt, synthetic construct
  source 1..22: mol_type = other RNA
ttttatgcatttggtctcattc

SEQ ID NO: 159190 - RNA, 22 nt, synthetic construct
  source 1..22: mol_type = other RNA
ttttatgctttgtctctggaag

SEQ ID NO: 159191 - RNA, 22 nt, synthetic construct
  source 1..22: mol_type = other RNA
ttttatggtaactcctgttctt

SEQ ID NO: 159192 - RNA, 22 nt, synthetic construct
  source 1..22: mol_type = other RNA
ttttatggttttttcccccctg

SEQ ID NO: 159193 - RNA, 22 nt, synthetic construct
  source 1..22: mol_type = other RNA
ttttatgtacacgtcttgtcaa

SEQ ID NO: 159194 - RNA, 22 nt, synthetic construct
  source 1..22: mol_type = other RNA
ttttatgtgcagtctaaccatt

SEQ ID NO: 159195 - RNA, 22 nt, synthetic construct
  source 1..22: mol_type = other RNA
ttttatgtgctttctcaacact

SEQ ID NO: 159196 - RNA, 22 nt, synthetic construct
  source 1..22: mol_type = other RNA
ttttattaatttggcttgggga

SEQ ID NO: 159197 - RNA, 22 nt, synthetic construct
  source 1..22: mol_type = other RNA
ttttattaggtgcacacaacac

SEQ ID NO: 159198 - RNA, 22 nt, synthetic construct
  source 1..22: mol_type = other RNA
ttttattctgttctagctcctg

SEQ ID NO: 159199 - RNA, 22 nt, synthetic construct
  source 1..22: mol_type = other RNA
ttttattgataagcacatggtg

SEQ ID NO: 159200 - RNA, 22 nt, synthetic construct
  source 1..22: mol_type = other RNA
ttttatttagcccatgtctaaa

SEQ ID NO: 159201 - RNA, 22 nt, synthetic construct
  source 1..22: mol_type = other RNA
ttttatttaggccctctataat

SEQ ID NO: 159202 - RNA, 22 nt, synthetic construct
  source 1..22: mol_type = other RNA
ttttatttatacaggtgcttac

SEQ ID NO: 159203 - RNA, 22 nt, synthetic construct
  source 1..22: mol_type = other RNA
ttttatttcttgacctcagtgg

SEQ ID NO: 159204 - RNA, 22 nt, synthetic construct
  source 1..22: mol_type = other RNA
ttttatttggctgttaccattt

SEQ ID NO: 159205 - RNA, 22 nt, synthetic construct
  source 1..22: mol_type = other RNA
ttttcaaaaacccaactctttc

SEQ ID NO: 159206 - RNA, 22 nt, synthetic construct
  source 1..22: mol_type = other RNA
ttttcaaatacctagttttcca

SEQ ID NO: 159207 - RNA, 22 nt, synthetic construct
  source 1..22: mol_type = other RNA
ttttcaacaaaggttgaaaact

SEQ ID NO: 159208 - RNA, 22 nt, synthetic construct
  source 1..22: mol_type = other RNA
ttttcaacctttgttgaaaacg

SEQ ID NO: 159209 - RNA, 22 nt, synthetic construct
  source 1..22: mol_type = other RNA
ttttcaactgaacaacgctgtg

SEQ ID NO: 159210 - RNA, 22 nt, synthetic construct
  source 1..22: mol_type = other RNA
ttttcaaggcttgtgcatcaga

SEQ ID NO: 159211 - RNA, 22 nt, synthetic construct
  source 1..22: mol_type = other RNA
ttttcaagggtgttttcccccc

SEQ ID NO: 159212 - RNA, 22 nt, synthetic construct
  source 1..22: mol_type = other RNA
ttttcaaggtagaagtacaaac

SEQ ID NO: 159213 - RNA, 22 nt, synthetic construct
  source 1..22: mol_type = other RNA
ttttcaatcttggaaatgatac

SEQ ID NO: 159214 - RNA, 22 nt, synthetic construct
  source 1..22: mol_type = other RNA
ttttcacaaacacacaaaccaa

SEQ ID NO: 159215 - RNA, 22 nt, synthetic construct
  source 1..22: mol_type = other RNA
ttttcacactataacagatgga

SEQ ID NO: 159216 - RNA, 22 nt, synthetic construct
  source 1..22: mol_type = other RNA
ttttcacagaaacagaaaaatc

SEQ ID NO: 159217 - RNA, 22 nt, synthetic construct
  source 1..22: mol_type = other RNA
ttttcacagggcagggagagag

SEQ ID NO: 159218 - RNA, 22 nt, synthetic construct
  source 1..22: mol_type = other RNA
ttttcacataaatttgccacat

SEQ ID NO: 159219 - RNA, 22 nt, synthetic construct
  source 1..22: mol_type = other RNA
ttttcacattcttcaccattcc

SEQ ID NO: 159220 - RNA, 22 nt, synthetic construct
  source 1..22: mol_type = other RNA
ttttcacattgcacagtctccc

SEQ ID NO: 159221 - RNA, 22 nt, synthetic construct
  source 1..22: mol_type = other RNA
ttttcaccagcggcatacagga

SEQ ID NO: 159222 - RNA, 22 nt, synthetic construct
  source 1..22: mol_type = other RNA
ttttcactctaatatggttcct

SEQ ID NO: 159223 - RNA, 22 nt, synthetic construct
  source 1..22: mol_type = other RNA
ttttcactctcaatagtgtcct

SEQ ID NO: 159224 - RNA, 22 nt, synthetic construct
  source 1..22: mol_type = other RNA
ttttcactcttagtgatgtctt

SEQ ID NO: 159225 - RNA, 22 nt, synthetic construct
  source 1..22: mol_type = other RNA
ttttcacttcgttcagtttagt

SEQ ID NO: 159226 - RNA, 22 nt, synthetic construct
  source 1..22: mol_type = other RNA
ttttcacttcttattggttatc

SEQ ID NO: 159227 - RNA, 22 nt, synthetic construct
  source 1..22: mol_type = other RNA
ttttcacttttgtgcaacataa

SEQ ID NO: 159228 - RNA, 22 nt, synthetic construct
  source 1..22: mol_type = other RNA
ttttcagattgaccttgtatcc

SEQ ID NO: 159229 - RNA, 22 nt, synthetic construct
  source 1..22: mol_type = other RNA
ttttcagcagcagagaagtgaa

SEQ ID NO: 159230 - RNA, 22 nt, synthetic construct
  source 1..22: mol_type = other RNA
ttttcagccctgatagatattg

SEQ ID NO: 159231 - RNA, 22 nt, synthetic construct
  source 1..22: mol_type = other RNA
ttttcaggactcatgagagctg

SEQ ID NO: 159232 - RNA, 22 nt, synthetic construct
  source 1..22: mol_type = other RNA
ttttcaggggggccactggaaa

SEQ ID NO: 159233 - RNA, 22 nt, synthetic construct
  source 1..22: mol_type = other RNA
ttttcaggtattgagcctgttc

SEQ ID NO: 159234 - RNA, 22 nt, synthetic construct
  source 1..22: mol_type = other RNA
ttttcaggttcaagcgactctc

SEQ ID NO: 159235 - RNA, 22 nt, synthetic construct
  source 1..22: mol_type = other RNA
ttttcagtccagatattatcct

SEQ ID NO: 159236 - RNA, 22 nt, synthetic construct
  source 1..22: mol_type = other RNA
ttttcagttgcatgaatttgtt

SEQ ID NO: 159237 - RNA, 22 nt, synthetic construct
  source 1..22: mol_type = other RNA
ttttcataacaaagctctgatg

SEQ ID NO: 159238 - RNA, 22 nt, synthetic construct
  source 1..22: mol_type = other RNA
ttttcatagcagcattgtttac

SEQ ID NO: 159239 - RNA, 22 nt, synthetic construct
  source 1..22: mol_type = other RNA
ttttcataggaaatacttgatc

SEQ ID NO: 159240 - RNA, 22 nt, synthetic construct
  source 1..22: mol_type = other RNA
ttttcatcactcactggcctga

SEQ ID NO: 159241 - RNA, 22 nt, synthetic construct
  source 1..22: mol_type = other RNA
ttttcatccaaacagaaaccct

SEQ ID NO: 159242 - RNA, 22 nt, synthetic construct
  source 1..22: mol_type = other RNA
ttttcatgcgacatatcaggga

SEQ ID NO: 159243 - RNA, 22 nt, synthetic construct
  source 1..22: mol_type = other RNA
ttttcatggttttaatgggcat

SEQ ID NO: 159244 - RNA, 22 nt, synthetic construct
  source 1..22: mol_type = other RNA
ttttcattacatttgcttaggc

SEQ ID NO: 159245 - RNA, 22 nt, synthetic construct
  source 1..22: mol_type = other RNA
ttttcattcgttcaaaacatca

SEQ ID NO: 159246 - RNA, 22 nt, synthetic construct
  source 1..22: mol_type = other RNA
ttttcattctacctggagcctg

SEQ ID NO: 159247 - RNA, 22 nt, synthetic construct
  source 1..22: mol_type = other RNA
ttttccaacagtttacacgcct

SEQ ID NO: 159248 - RNA, 22 nt, synthetic construct
  source 1..22: mol_type = other RNA
ttttccaaccaagcccaacttt

SEQ ID NO: 159249 - RNA, 22 nt, synthetic construct
  source 1..22: mol_type = other RNA
ttttccaaccactgaatcagat

SEQ ID NO: 159250 - RNA, 22 nt, synthetic construct
  source 1..22: mol_type = other RNA
ttttccaagccttaaaagtgct

SEQ ID NO: 159251 - RNA, 22 nt, synthetic construct
  source 1..22: mol_type = other RNA
ttttccaatccgggaacatgac

SEQ ID NO: 159252 - RNA, 22 nt, synthetic construct
  source 1..22: mol_type = other RNA
ttttccacagtgactttactgt

SEQ ID NO: 159253 - RNA, 22 nt, synthetic construct
  source 1..22: mol_type = other RNA
ttttccacataaagtcttgctg

SEQ ID NO: 159254 - RNA, 22 nt, synthetic construct
  source 1..22: mol_type = other RNA
ttttccacataattgaacccac

SEQ ID NO: 159255 - RNA, 22 nt, synthetic construct
  source 1..22: mol_type = other RNA
ttttccaggaaaagcaaatgtc

SEQ ID NO: 159256 - RNA, 22 nt, synthetic construct
  source 1..22: mol_type = other RNA
ttttccaggaccaatttaccat

SEQ ID NO: 159257 - RNA, 22 nt, synthetic construct
  source 1..22: mol_type = other RNA
ttttccagtatattcatagtag

SEQ ID NO: 159258 - RNA, 22 nt, synthetic construct
  source 1..22: mol_type = other RNA
ttttccagtcttctcatacaga

SEQ ID NO: 159259 - RNA, 22 nt, synthetic construct
  source 1..22: mol_type = other RNA
ttttccattcacacaccctttc

SEQ ID NO: 159260 - RNA, 22 nt, synthetic construct
  source 1..22: mol_type = other RNA
ttttccattcatgtaatgcaaa

SEQ ID NO: 159261 - RNA, 22 nt, synthetic construct
  source 1..22: mol_type = other RNA
ttttcccaaagatagactcttc

SEQ ID NO: 159262 - RNA, 22 nt, synthetic construct
  source 1..22: mol_type = other RNA
ttttcccaatctctggtattct

SEQ ID NO: 159263 - RNA, 22 nt, synthetic construct
  source 1..22: mol_type = other RNA
ttttcccagatacgttaaagga

SEQ ID NO: 159264 - RNA, 22 nt, synthetic construct
  source 1..22: mol_type = other RNA
ttttcccaggagctagaacaga

SEQ ID NO: 159265 - RNA, 22 nt, synthetic construct
  source 1..22: mol_type = other RNA
ttttcccccaattaaactatag

SEQ ID NO: 159266 - RNA, 22 nt, synthetic construct
  source 1..22: mol_type = other RNA
ttttcccccctaaaacactgga

SEQ ID NO: 159267 - RNA, 22 nt, synthetic construct
  source 1..22: mol_type = other RNA
ttttcccccctggaacaatcaa

SEQ ID NO: 159268 - RNA, 22 nt, synthetic construct
  source 1..22: mol_type = other RNA
ttttccccctacacccagttca

SEQ ID NO: 159269 - RNA, 22 nt, synthetic construct
  source 1..22: mol_type = other RNA
ttttcccgctacacaagtatta

SEQ ID NO: 159270 - RNA, 22 nt, synthetic construct
  source 1..22: mol_type = other RNA
ttttccctcctttttatcaccc

SEQ ID NO: 159271 - RNA, 22 nt, synthetic construct
  source 1..22: mol_type = other RNA
ttttccctgtgtatgtgtagtc

SEQ ID NO: 159272 - RNA, 22 nt, synthetic construct
  source 1..22: mol_type = other RNA
ttttcccttttgtagctaatat

SEQ ID NO: 159273 - RNA, 22 nt, synthetic construct
  source 1..22: mol_type = other RNA
ttttccggttgtatagcagtaa

SEQ ID NO: 159274 - RNA, 22 nt, synthetic construct
  source 1..22: mol_type = other RNA
ttttccgtctagccacttccta

SEQ ID NO: 159275 - RNA, 22 nt, synthetic construct
  source 1..22: mol_type = other RNA
ttttccgtgtgacaaaaagtag

SEQ ID NO: 159276 - RNA, 22 nt, synthetic construct
  source 1..22: mol_type = other RNA
ttttcctaaaactccccatgca

SEQ ID NO: 159277 - RNA, 22 nt, synthetic construct
  source 1..22: mol_type = other RNA
ttttcctaaccactgttatctg

SEQ ID NO: 159278 - RNA, 22 nt, synthetic construct
  source 1..22: mol_type = other RNA
ttttcctaccctgaggatataa

SEQ ID NO: 159279 - RNA, 22 nt, synthetic construct
  source 1..22: mol_type = other RNA
ttttcctactaacaagaaaggg

SEQ ID NO: 159280 - RNA, 22 nt, synthetic construct
  source 1..22: mol_type = other RNA
ttttcctagactgccaggtagg

SEQ ID NO: 159281 - RNA, 22 nt, synthetic construct
  source 1..22: mol_type = other RNA
ttttcctcccttcagcctgtgt

SEQ ID NO: 159282 - RNA, 22 nt, synthetic construct
  source 1..22: mol_type = other RNA
ttttcctccttctgctcacttt

SEQ ID NO: 159283 - RNA, 22 nt, synthetic construct
  source 1..22: mol_type = other RNA
ttttcctcgttttcaacaaagg

SEQ ID NO: 159284 - RNA, 22 nt, synthetic construct
  source 1..22: mol_type = other RNA
ttttcctgatggacattctgct

SEQ ID NO: 159285 - RNA, 22 nt, synthetic construct
  source 1..22: mol_type = other RNA
ttttcctgctgtcgtttatgca

SEQ ID NO: 159286 - RNA, 22 nt, synthetic construct
  source 1..22: mol_type = other RNA
ttttcctggaaaacttctctgg

SEQ ID NO: 159287 - RNA, 22 nt, synthetic construct
  source 1..22: mol_type = other RNA
ttttcctgttccgggatcctgt

SEQ ID NO: 159288 - RNA, 22 nt, synthetic construct
  source 1..22: mol_type = other RNA
ttttccttatccattcatctct

SEQ ID NO: 159289 - RNA, 22 nt, synthetic construct
  source 1..22: mol_type = other RNA
ttttccttatggatatctggcc

SEQ ID NO: 159290 - RNA, 22 nt, synthetic construct
  source 1..22: mol_type = other RNA
ttttccttcttaagacatttgg

SEQ ID NO: 159291 - RNA, 22 nt, synthetic construct
  source 1..22: mol_type = other RNA
ttttccttctttgggggaagca

SEQ ID NO: 159292 - RNA, 22 nt, synthetic construct
  source 1..22: mol_type = other RNA
ttttcctttaacgtatctggga

SEQ ID NO: 159293 - RNA, 22 nt, synthetic construct
  source 1..22: mol_type = other RNA
ttttcctttgcctaagtctcag

SEQ ID NO: 159294 - RNA, 22 nt, synthetic construct
  source 1..22: mol_type = other RNA
ttttcctttgcctttcactttg

SEQ ID NO: 159295 - RNA, 22 nt, synthetic construct
  source 1..22: mol_type = other RNA
ttttcgaccaagttactagaag

SEQ ID NO: 159296 - RNA, 22 nt, synthetic construct
  source 1..22: mol_type = other RNA
ttttcgagactgagtaatattc

SEQ ID NO: 159297 - RNA, 22 nt, synthetic construct
  source 1..22: mol_type = other RNA
ttttcgtatcttttaacagatg

SEQ ID NO: 159298 - RNA, 22 nt, synthetic construct
  source 1..22: mol_type = other RNA
ttttcgtgtactgaaaccagtg

SEQ ID NO: 159299 - RNA, 22 nt, synthetic construct
  source 1..22: mol_type = other RNA
ttttctaaaccttaaaagagtg

SEQ ID NO: 159300 - RNA, 22 nt, synthetic construct
  source 1..22: mol_type = other RNA
ttttctaaactggttttcctga

SEQ ID NO: 159301 - RNA, 22 nt, synthetic construct
  source 1..22: mol_type = other RNA
ttttctaaattgaacagcctaa

SEQ ID NO: 159302 - RNA, 22 nt, synthetic construct
  source 1..22: mol_type = other RNA
ttttctaagagccaaagacatt

SEQ ID NO: 159303 - RNA, 22 nt, synthetic construct
  source 1..22: mol_type = other RNA
ttttctaggaaccatattagag

SEQ ID NO: 159304 - RNA, 22 nt, synthetic construct
  source 1..22: mol_type = other RNA
ttttctaggtagtttctttgaa

SEQ ID NO: 159305 - RNA, 22 nt, synthetic construct
  source 1..22: mol_type = other RNA
ttttctagttagtttgttgacc

SEQ ID NO: 159306 - RNA, 22 nt, synthetic construct
  source 1..22: mol_type = other RNA
ttttctagtttgaggtgtacaa

SEQ ID NO: 159307 - RNA, 22 nt, synthetic construct
  source 1..22: mol_type = other RNA
ttttctatagtggctgcaccat

SEQ ID NO: 159308 - RNA, 22 nt, synthetic construct
  source 1..22: mol_type = other RNA
ttttctatctgaacattttagc

SEQ ID NO: 159309 - RNA, 22 nt, synthetic construct
  source 1..22: mol_type = other RNA
ttttctattcattaccaggctg

SEQ ID NO: 159310 - RNA, 22 nt, synthetic construct
  source 1..22: mol_type = other RNA
ttttctcccaaggttgcctgtt

SEQ ID NO: 159311 - RNA, 22 nt, synthetic construct
  source 1..22: mol_type = other RNA
ttttctcctaagtcttcttcta

SEQ ID NO: 159312 - RNA, 22 nt, synthetic construct
  source 1..22: mol_type = other RNA
ttttctccttctggaagatttc

SEQ ID NO: 159313 - RNA, 22 nt, synthetic construct
  source 1..22: mol_type = other RNA
ttttctcgacacacaatccaag

SEQ ID NO: 159314 - RNA, 22 nt, synthetic construct
  source 1..22: mol_type = other RNA
ttttctcgtgcatgtctgcagg

SEQ ID NO: 159315 - RNA, 22 nt, synthetic construct
  source 1..22: mol_type = other RNA
ttttctctacagttaacaatac

SEQ ID NO: 159316 - RNA, 22 nt, synthetic construct
  source 1..22: mol_type = other RNA
ttttctctcatgttgggtaaaa

SEQ ID NO: 159317 - RNA, 22 nt, synthetic construct
  source 1..22: mol_type = other RNA
ttttctctccttgcacattaga

SEQ ID NO: 159318 - RNA, 22 nt, synthetic construct
  source 1..22: mol_type = other RNA
ttttctgacaatttcagggaga

SEQ ID NO: 159319 - RNA, 22 nt, synthetic construct
  source 1..22: mol_type = other RNA
ttttctgaccaactatttcact

SEQ ID NO: 159320 - RNA, 22 nt, synthetic construct
  source 1..22: mol_type = other RNA
ttttctgactctgtgcttgtgc

SEQ ID NO: 159321 - RNA, 22 nt, synthetic construct
  source 1..22: mol_type = other RNA
ttttctgagcaactactatttc

SEQ ID NO: 159322 - RNA, 22 nt, synthetic construct
  source 1..22: mol_type = other RNA
ttttctgagtatattctgtgaa

SEQ ID NO: 159323 - RNA, 22 nt, synthetic construct
  source 1..22: mol_type = other RNA
ttttctgattgcccattataaa

SEQ ID NO: 159324 - RNA, 22 nt, synthetic construct
  source 1..22: mol_type = other RNA
ttttctgatttgctggctcagt

SEQ ID NO: 159325 - RNA, 22 nt, synthetic construct
  source 1..22: mol_type = other RNA
ttttctgcaattggaagactat

SEQ ID NO: 159326 - RNA, 22 nt, synthetic construct
  source 1..22: mol_type = other RNA
ttttctgcatcttttgagggta

SEQ ID NO: 159327 - RNA, 22 nt, synthetic construct
  source 1..22: mol_type = other RNA
ttttctgcatttggtttgcaaa

SEQ ID NO: 159328 - RNA, 22 nt, synthetic construct
  source 1..22: mol_type = other RNA
ttttctgcttctcaataaggaa

SEQ ID NO: 159329 - RNA, 22 nt, synthetic construct
  source 1..22: mol_type = other RNA
ttttctggaaactcaaacccaa

SEQ ID NO: 159330 - RNA, 22 nt, synthetic construct
  source 1..22: mol_type = other RNA
ttttctggaccacaatcttacc

SEQ ID NO: 159331 - RNA, 22 nt, synthetic construct
  source 1..22: mol_type = other RNA
ttttctggaggctagaagtccc

SEQ ID NO: 159332 - RNA, 22 nt, synthetic construct
  source 1..22: mol_type = other RNA
ttttctggttttctggaggcta

SEQ ID NO: 159333 - RNA, 22 nt, synthetic construct
  source 1..22: mol_type = other RNA
ttttctgtaatgtttgtacttc

SEQ ID NO: 159334 - RNA, 22 nt, synthetic construct
  source 1..22: mol_type = other RNA
ttttctgtagaatatccaagca

SEQ ID NO: 159335 - RNA, 22 nt, synthetic construct
  source 1..22: mol_type = other RNA
ttttctgtcattctgcagtttg

SEQ ID NO: 159336 - RNA, 22 nt, synthetic construct
  source 1..22: mol_type = other RNA
ttttctgtttctgtgaaaaaac

SEQ ID NO: 159337 - RNA, 22 nt, synthetic construct
  source 1..22: mol_type = other RNA
ttttcttaaaactttaggtcag

SEQ ID NO: 159338 - RNA, 22 nt, synthetic construct
  source 1..22: mol_type = other RNA
ttttcttaccctttactcagat

SEQ ID NO: 159339 - RNA, 22 nt, synthetic construct
  source 1..22: mol_type = other RNA
ttttcttacctaagcatcgtga

SEQ ID NO: 159340 - RNA, 22 nt, synthetic construct
  source 1..22: mol_type = other RNA
ttttcttagttccattattcca

SEQ ID NO: 159341 - RNA, 22 nt, synthetic construct
  source 1..22: mol_type = other RNA
ttttcttatctaggcgaaatat

SEQ ID NO: 159342 - RNA, 22 nt, synthetic construct
  source 1..22: mol_type = other RNA
ttttcttcatggactagactgc

SEQ ID NO: 159343 - RNA, 22 nt, synthetic construct
  source 1..22: mol_type = other RNA
ttttcttcccatctcactcacc

SEQ ID NO: 159344 - RNA, 22 nt, synthetic construct
  source 1..22: mol_type = other RNA
ttttcttcttgttttgttctcg

SEQ ID NO: 159345 - RNA, 22 nt, synthetic construct
  source 1..22: mol_type = other RNA
ttttcttgctttgctgccccag

SEQ ID NO: 159346 - RNA, 22 nt, synthetic construct
  source 1..22: mol_type = other RNA
ttttcttggtggtaactgatgt

SEQ ID NO: 159347 - RNA, 22 nt, synthetic construct
  source 1..22: mol_type = other RNA
ttttcttgtgggtattttgttg

SEQ ID NO: 159348 - RNA, 22 nt, synthetic construct
  source 1..22: mol_type = other RNA
ttttctttcgcatcattcaaat

SEQ ID NO: 159349 - RNA, 22 nt, synthetic construct
  source 1..22: mol_type = other RNA
ttttctttgagtagttcatgtt

SEQ ID NO: 159350 - RNA, 22 nt, synthetic construct
  source 1..22: mol_type = other RNA
ttttcttttgttgcctgtagtt

SEQ ID NO: 159351 - RNA, 22 nt, synthetic construct
  source 1..22: mol_type = other RNA
ttttgaaaaaacttcccttagc

SEQ ID NO: 159352 - RNA, 22 nt, synthetic construct
  source 1..22: mol_type = other RNA
ttttgaaaaacagatcttggcc

SEQ ID NO: 159353 - RNA, 22 nt, synthetic construct
  source 1..22: mol_type = other RNA
ttttgaaaagaacaacatggta

SEQ ID NO: 159354 - RNA, 22 nt, synthetic construct
  source 1..22: mol_type = other RNA
ttttgaaactgagcatcccaga

SEQ ID NO: 159355 - RNA, 22 nt, synthetic construct
  source 1..22: mol_type = other RNA
ttttgaacaagagcgtcgtacc

SEQ ID NO: 159356 - RNA, 22 nt, synthetic construct
  source 1..22: mol_type = other RNA
ttttgaacactctgcaatttta

SEQ ID NO: 159357 - RNA, 22 nt, synthetic construct
  source 1..22: mol_type = other RNA
ttttgaacgaatgaaaacacaa

SEQ ID NO: 159358 - RNA, 22 nt, synthetic construct
  source 1..22: mol_type = other RNA
ttttgaagaaagttttgcagtt

SEQ ID NO: 159359 - RNA, 22 nt, synthetic construct
  source 1..22: mol_type = other RNA
ttttgaataacctcataagaac

SEQ ID NO: 159360 - RNA, 22 nt, synthetic construct
  source 1..22: mol_type = other RNA
ttttgaatcatgggagccaaac

SEQ ID NO: 159361 - RNA, 22 nt, synthetic construct
  source 1..22: mol_type = other RNA
ttttgacagatgagactcttaa

SEQ ID NO: 159362 - RNA, 22 nt, synthetic construct
  source 1..22: mol_type = other RNA
ttttgacagccacgtgtattga

SEQ ID NO: 159363 - RNA, 22 nt, synthetic construct
  source 1..22: mol_type = other RNA
ttttgacgcgcaacaattcaac

SEQ ID NO: 159364 - RNA, 22 nt, synthetic construct
  source 1..22: mol_type = other RNA
ttttgactcagtacttccctct

SEQ ID NO: 159365 - RNA, 22 nt, synthetic construct
  source 1..22: mol_type = other RNA
ttttgagacacggtctcacact

SEQ ID NO: 159366 - RNA, 22 nt, synthetic construct
  source 1..22: mol_type = other RNA
ttttgagacagattctctgtct

SEQ ID NO: 159367 - RNA, 22 nt, synthetic construct
  source 1..22: mol_type = other RNA
ttttgagacagggtctcactct

SEQ ID NO: 159368 - RNA, 22 nt, synthetic construct
  source 1..22: mol_type = other RNA
ttttgagacctcaggcagtcta

SEQ ID NO: 159369 - RNA, 22 nt, synthetic construct
  source 1..22: mol_type = other RNA
ttttgagacggaatcttaccct

SEQ ID NO: 159370 - RNA, 22 nt, synthetic construct
  source 1..22: mol_type = other RNA
ttttgagagtgcagtatgtagg

SEQ ID NO: 159371 - RNA, 22 nt, synthetic construct
  source 1..22: mol_type = other RNA
ttttgagatttgagtcttgctc

SEQ ID NO: 159372 - RNA, 22 nt, synthetic construct
  source 1..22: mol_type = other RNA
ttttgaggcagagagatggtgg

SEQ ID NO: 159373 - RNA, 22 nt, synthetic construct
  source 1..22: mol_type = other RNA
ttttgaggcttttggattttct

SEQ ID NO: 159374 - RNA, 22 nt, synthetic construct
  source 1..22: mol_type = other RNA
ttttgagtggcatcatactgga

SEQ ID NO: 159375 - RNA, 22 nt, synthetic construct
  source 1..22: mol_type = other RNA
ttttgagtgtaaggtgtttggt

SEQ ID NO: 159376 - RNA, 22 nt, synthetic construct
  source 1..22: mol_type = other RNA
ttttgagttattgcatagggat

SEQ ID NO: 159377 - RNA, 22 nt, synthetic construct
  source 1..22: mol_type = other RNA
ttttgagtttggtgtatttagt

SEQ ID NO: 159378 - RNA, 22 nt, synthetic construct
  source 1..22: mol_type = other RNA
ttttgataaaaatctctacagg

SEQ ID NO: 159379 - RNA, 22 nt, synthetic construct
  source 1..22: mol_type = other RNA
ttttgatacggagtctcgctct

SEQ ID NO: 159380 - RNA, 22 nt, synthetic construct
  source 1..22: mol_type = other RNA
ttttgatagttgcagattcatc

SEQ ID NO: 159381 - RNA, 22 nt, synthetic construct
  source 1..22: mol_type = other RNA
ttttgatcatcgcattacgagt

SEQ ID NO: 159382 - RNA, 22 nt, synthetic construct
  source 1..22: mol_type = other RNA
ttttgattactgactcaatctt

SEQ ID NO: 159383 - RNA, 22 nt, synthetic construct
  source 1..22: mol_type = other RNA
ttttgcaaaccaaatgcagaaa

SEQ ID NO: 159384 - RNA, 22 nt, synthetic construct
  source 1..22: mol_type = other RNA
ttttgcaagatgcataagttct

SEQ ID NO: 159385 - RNA, 22 nt, synthetic construct
  source 1..22: mol_type = other RNA
ttttgcaagattaatcttgtga

SEQ ID NO: 159386 - RNA, 22 nt, synthetic construct
  source 1..22: mol_type = other RNA
ttttgcagagacggggtcccac

SEQ ID NO: 159387 - RNA, 22 nt, synthetic construct
  source 1..22: mol_type = other RNA
ttttgcagagatgaggtctcgc

SEQ ID NO: 159388 - RNA, 22 nt, synthetic construct
  source 1..22: mol_type = other RNA
ttttgcagttggggactcttat

SEQ ID NO: 159389 - RNA, 22 nt, synthetic construct
  source 1..22: mol_type = other RNA
ttttgccaaattatttgagagt

SEQ ID NO: 159390 - RNA, 22 nt, synthetic construct
  source 1..22: mol_type = other RNA
ttttgccaagtataagatgatg

SEQ ID NO: 159391 - RNA, 22 nt, synthetic construct
  source 1..22: mol_type = other RNA
ttttgccagctaacttttaacc

SEQ ID NO: 159392 - RNA, 22 nt, synthetic construct
  source 1..22: mol_type = other RNA
ttttgccagtgttttaaagcag

SEQ ID NO: 159393 - RNA, 22 nt, synthetic construct
  source 1..22: mol_type = other RNA
ttttgcccactcttatatccta

SEQ ID NO: 159394 - RNA, 22 nt, synthetic construct
  source 1..22: mol_type = other RNA
ttttgcctctttgctaataagt

SEQ ID NO: 159395 - RNA, 22 nt, synthetic construct
  source 1..22: mol_type = other RNA
ttttgcctggatgaatgcagtg

SEQ ID NO: 159396 - RNA, 22 nt, synthetic construct
  source 1..22: mol_type = other RNA
ttttgcctttcgcttttggagc

SEQ ID NO: 159397 - RNA, 22 nt, synthetic construct
  source 1..22: mol_type = other RNA
ttttgctcacacttactaaatg

SEQ ID NO: 159398 - RNA, 22 nt, synthetic construct
  source 1..22: mol_type = other RNA
ttttgctgagggaatttttctt

SEQ ID NO: 159399 - RNA, 22 nt, synthetic construct
  source 1..22: mol_type = other RNA
ttttgctgcatcccaagggttt

SEQ ID NO: 159400 - RNA, 22 nt, synthetic construct
  source 1..22: mol_type = other RNA
ttttgctgccaagtcagcactt

SEQ ID NO: 159401 - RNA, 22 nt, synthetic construct
  source 1..22: mol_type = other RNA
ttttgctgtatacccaggtgtg

SEQ ID NO: 159402 - RNA, 22 nt, synthetic construct
  source 1..22: mol_type = other RNA
ttttgcttaaagttggtcctgc

SEQ ID NO: 159403 - RNA, 22 nt, synthetic construct
  source 1..22: mol_type = other RNA
ttttgcttactgtagcattgaa

SEQ ID NO: 159404 - RNA, 22 nt, synthetic construct
  source 1..22: mol_type = other RNA
ttttgcttcgaagcttattaaa

SEQ ID NO: 159405 - RNA, 22 nt, synthetic construct
  source 1..22: mol_type = other RNA
ttttgctttgggtctatagttt

SEQ ID NO: 159406 - RNA, 22 nt, synthetic construct
  source 1..22: mol_type = other RNA
ttttgcttttgctttgggtcta

SEQ ID NO: 159407 - RNA, 22 nt, synthetic construct
  source 1..22: mol_type = other RNA
ttttggaagactatgagaagga

SEQ ID NO: 159408 - RNA, 22 nt, synthetic construct
  source 1..22: mol_type = other RNA
ttttggaagcatgtggccagga

SEQ ID NO: 159409 - RNA, 22 nt, synthetic construct
  source 1..22: mol_type = other RNA
ttttggaatttaaggggtaaat

SEQ ID NO: 159410 - RNA, 22 nt, synthetic construct
  source 1..22: mol_type = other RNA
ttttggagctataatttatctg

SEQ ID NO: 159411 - RNA, 22 nt, synthetic construct
  source 1..22: mol_type = other RNA
ttttggatgcagatttcttttt

SEQ ID NO: 159412 - RNA, 22 nt, synthetic construct
  source 1..22: mol_type = other RNA
ttttggattgcgattgtttcag

SEQ ID NO: 159413 - RNA, 22 nt, synthetic construct
  source 1..22: mol_type = other RNA
ttttggcaaattgtcagatttt

SEQ ID NO: 159414 - RNA, 22 nt, synthetic construct
  source 1..22: mol_type = other RNA
ttttggcagcgtaactccatct

SEQ ID NO: 159415 - RNA, 22 nt, synthetic construct
  source 1..22: mol_type = other RNA
ttttggcatacaactgctcata

SEQ ID NO: 159416 - RNA, 22 nt, synthetic construct
  source 1..22: mol_type = other RNA
ttttgggatcacacttgatggt

SEQ ID NO: 159417 - RNA, 22 nt, synthetic construct
  source 1..22: mol_type = other RNA
ttttgggatctgtcatgtttga

SEQ ID NO: 159418 - RNA, 22 nt, synthetic construct
  source 1..22: mol_type = other RNA
ttttgggcctttctgtttgttt

SEQ ID NO: 159419 - RNA, 22 nt, synthetic construct
  source 1..22: mol_type = other RNA
ttttggggccatctgaattcaa

SEQ ID NO: 159420 - RNA, 22 nt, synthetic construct
  source 1..22: mol_type = other RNA
ttttgggggaagagagcattgc

SEQ ID NO: 159421 - RNA, 22 nt, synthetic construct
  source 1..22: mol_type = other RNA
ttttggtaaaatgtggcaaatt

SEQ ID NO: 159422 - RNA, 22 nt, synthetic construct
  source 1..22: mol_type = other RNA
ttttggtaatgggaaagacagg

SEQ ID NO: 159423 - RNA, 22 nt, synthetic construct
  source 1..22: mol_type = other RNA
ttttggtagaggattccaggtt

SEQ ID NO: 159424 - RNA, 22 nt, synthetic construct
  source 1..22: mol_type = other RNA
ttttggtagataccagaccctt

SEQ ID NO: 159425 - RNA, 22 nt, synthetic construct
  source 1..22: mol_type = other RNA
ttttggtatgttgtgttttcat

SEQ ID NO: 159426 - RNA, 22 nt, synthetic construct
  source 1..22: mol_type = other RNA
ttttggtattttttagagacag

SEQ ID NO: 159427 - RNA, 22 nt, synthetic construct
  source 1..22: mol_type = other RNA
ttttggtcaaaactgtattttc

SEQ ID NO: 159428 - RNA, 22 nt, synthetic construct
  source 1..22: mol_type = other RNA
ttttggtcttaccctctagctc

SEQ ID NO: 159429 - RNA, 22 nt, synthetic construct
  source 1..22: mol_type = other RNA
ttttggtgtttttctaggtagt

SEQ ID NO: 159430 - RNA, 22 nt, synthetic construct
  source 1..22: mol_type = other RNA
ttttggttcacttgaaacctgc

SEQ ID NO: 159431 - RNA, 22 nt, synthetic construct
  source 1..22: mol_type = other RNA
ttttggtttgtatgtgttaaac

SEQ ID NO: 159432 - RNA, 22 nt, synthetic construct
  source 1..22: mol_type = other RNA
ttttgtaaatgaaacacttgtg

SEQ ID NO: 159433 - RNA, 22 nt, synthetic construct
  source 1..22: mol_type = other RNA
ttttgtaacgtgtatagctttt

SEQ ID NO: 159434 - RNA, 22 nt, synthetic construct
  source 1..22: mol_type = other RNA
ttttgtaataacttggagaact

SEQ ID NO: 159435 - RNA, 22 nt, synthetic construct
  source 1..22: mol_type = other RNA
ttttgtaatctaaggattatgg

SEQ ID NO: 159436 - RNA, 22 nt, synthetic construct
  source 1..22: mol_type = other RNA
ttttgtactacttgtcaggtgg

SEQ ID NO: 159437 - RNA, 22 nt, synthetic construct
  source 1..22: mol_type = other RNA
ttttgtagaccctgttagtccc

SEQ ID NO: 159438 - RNA, 22 nt, synthetic construct
  source 1..22: mol_type = other RNA
ttttgtagagacagaatcttac

SEQ ID NO: 159439 - RNA, 22 nt, synthetic construct
  source 1..22: mol_type = other RNA
ttttgtagagggaatttgtttt

SEQ ID NO: 159440 - RNA, 22 nt, synthetic construct
  source 1..22: mol_type = other RNA
ttttgtagctaatatctttggg

SEQ ID NO: 159441 - RNA, 22 nt, synthetic construct
  source 1..22: mol_type = other RNA
ttttgtagtgtcttaatcctat

SEQ ID NO: 159442 - RNA, 22 nt, synthetic construct
  source 1..22: mol_type = other RNA
ttttgtatcctgagacttaggc

SEQ ID NO: 159443 - RNA, 22 nt, synthetic construct
  source 1..22: mol_type = other RNA
ttttgtatcctgtttgagaagt

SEQ ID NO: 159444 - RNA, 22 nt, synthetic construct
  source 1..22: mol_type = other RNA
ttttgtattctgacctaaagtt

SEQ ID NO: 159445 - RNA, 22 nt, synthetic construct
  source 1..22: mol_type = other RNA
ttttgtcaagctatcagaattt

SEQ ID NO: 159446 - RNA, 22 nt, synthetic construct
  source 1..22: mol_type = other RNA
ttttgtcaagtgactccaagca

SEQ ID NO: 159447 - RNA, 22 nt, synthetic construct
  source 1..22: mol_type = other RNA
ttttgtcacacggaaaacatta

SEQ ID NO: 159448 - RNA, 22 nt, synthetic construct
  source 1..22: mol_type = other RNA
ttttgtccaccagacaaaaata

SEQ ID NO: 159449 - RNA, 22 nt, synthetic construct
  source 1..22: mol_type = other RNA
ttttgtctggaacacacattag

SEQ ID NO: 159450 - RNA, 22 nt, synthetic construct
  source 1..22: mol_type = other RNA
ttttgtctggtggacaaaaaac

SEQ ID NO: 159451 - RNA, 22 nt, synthetic construct
  source 1..22: mol_type = other RNA
ttttgtgacaagttcagcatct

SEQ ID NO: 159452 - RNA, 22 nt, synthetic construct
  source 1..22: mol_type = other RNA
ttttgtgagttttaactcttgc

SEQ ID NO: 159453 - RNA, 22 nt, synthetic construct
  source 1..22: mol_type = other RNA
ttttgtgcaacataaatagggt

SEQ ID NO: 159454 - RNA, 22 nt, synthetic construct
  source 1..22: mol_type = other RNA
ttttgtgcatcaaaggacacta

SEQ ID NO: 159455 - RNA, 22 nt, synthetic construct
  source 1..22: mol_type = other RNA
ttttgtggagatggggacttgc

SEQ ID NO: 159456 - RNA, 22 nt, synthetic construct
  source 1..22: mol_type = other RNA
ttttgtgggaattcagtcacca

SEQ ID NO: 159457 - RNA, 22 nt, synthetic construct
  source 1..22: mol_type = other RNA
ttttgtgtagaggtgaagttaa

SEQ ID NO: 159458 - RNA, 22 nt, synthetic construct
  source 1..22: mol_type = other RNA
ttttgtgtcttctgtttttctt

SEQ ID NO: 159459 - RNA, 22 nt, synthetic construct
  source 1..22: mol_type = other RNA
ttttgtgtttgtgaccagatca

SEQ ID NO: 159460 - RNA, 22 nt, synthetic construct
  source 1..22: mol_type = other RNA
ttttgttatggtaggtgctttt

SEQ ID NO: 159461 - RNA, 22 nt, synthetic construct
  source 1..22: mol_type = other RNA
ttttgttattagggtaatgctg

SEQ ID NO: 159462 - RNA, 22 nt, synthetic construct
  source 1..22: mol_type = other RNA
ttttgttcaggagttttgcctc

SEQ ID NO: 159463 - RNA, 22 nt, synthetic construct
  source 1..22: mol_type = other RNA
ttttgttctcgttcatgttcaa

SEQ ID NO: 159464 - RNA, 22 nt, synthetic construct
  source 1..22: mol_type = other RNA
ttttgttgacatcctttgcgtc

SEQ ID NO: 159465 - RNA, 22 nt, synthetic construct
  source 1..22: mol_type = other RNA
ttttgttgcctgtagttttggt

SEQ ID NO: 159466 - RNA, 22 nt, synthetic construct
  source 1..22: mol_type = other RNA
ttttgttgctattgttgaattg

SEQ ID NO: 159467 - RNA, 22 nt, synthetic construct
  source 1..22: mol_type = other RNA
ttttgttgttggtttgtgtgtt

SEQ ID NO: 159468 - RNA, 22 nt, synthetic construct
  source 1..22: mol_type = other RNA
ttttgttgttgttgtttctgag

SEQ ID NO: 159469 - RNA, 22 nt, synthetic construct
  source 1..22: mol_type = other RNA
ttttgtttatttgctgtcaggc

SEQ ID NO: 159470 - RNA, 22 nt, synthetic construct
  source 1..22: mol_type = other RNA
ttttgtttgtttctgaggtgga

SEQ ID NO: 159471 - RNA, 22 nt, synthetic construct
  source 1..22: mol_type = other RNA
ttttgttttctccttctggaag

SEQ ID NO: 159472 - RNA, 22 nt, synthetic construct
  source 1..22: mol_type = other RNA
ttttgttttggtcaaaactgta

SEQ ID NO: 159473 - RNA, 22 nt, synthetic construct
  source 1..22: mol_type = other RNA
ttttgtttttctctccttgcac

SEQ ID NO: 159474 - RNA, 22 nt, synthetic construct
  source 1..22: mol_type = other RNA
ttttgttttttcacagaaacag

SEQ ID NO: 159475 - RNA, 22 nt, synthetic construct
  source 1..22: mol_type = other RNA
tttttaaaaactttttgggcct

SEQ ID NO: 159476 - RNA, 22 nt, synthetic construct
  source 1..22: mol_type = other RNA
tttttaaaaagcagctacctgt

SEQ ID NO: 159477 - RNA, 22 nt, synthetic construct
  source 1..22: mol_type = other RNA
tttttaaaagagcgaagaggga

SEQ ID NO: 159478 - RNA, 22 nt, synthetic construct
  source 1..22: mol_type = other RNA
tttttaaaagatgcattctgtc

SEQ ID NO: 159479 - RNA, 22 nt, synthetic construct
  source 1..22: mol_type = other RNA
tttttaaacaggtgtaagagat

SEQ ID NO: 159480 - RNA, 22 nt, synthetic construct
  source 1..22: mol_type = other RNA
tttttaaggctgaacaatattc

SEQ ID NO: 159481 - RNA, 22 nt, synthetic construct
  source 1..22: mol_type = other RNA
tttttaagtggcgctgtttgcc

SEQ ID NO: 159482 - RNA, 22 nt, synthetic construct
  source 1..22: mol_type = other RNA
tttttaatctacaaaacagggt

SEQ ID NO: 159483 - RNA, 22 nt, synthetic construct
  source 1..22: mol_type = other RNA
tttttaatgtagatcctgagga

SEQ ID NO: 159484 - RNA, 22 nt, synthetic construct
  source 1..22: mol_type = other RNA
tttttacacttggagttttccc

SEQ ID NO: 159485 - RNA, 22 nt, synthetic construct
  source 1..22: mol_type = other RNA
tttttacatgtagttttccctg

SEQ ID NO: 159486 - RNA, 22 nt, synthetic construct
  source 1..22: mol_type = other RNA
tttttacattaaagacagctac

SEQ ID NO: 159487 - RNA, 22 nt, synthetic construct
  source 1..22: mol_type = other RNA
tttttaccaagttgaatttctg

SEQ ID NO: 159488 - RNA, 22 nt, synthetic construct
  source 1..22: mol_type = other RNA
tttttacccaacatgagagaaa

SEQ ID NO: 159489 - RNA, 22 nt, synthetic construct
  source 1..22: mol_type = other RNA
tttttacccggagaggtgaact

SEQ ID NO: 159490 - RNA, 22 nt, synthetic construct
  source 1..22: mol_type = other RNA
tttttacccgtggaaatacttg

SEQ ID NO: 159491 - RNA, 22 nt, synthetic construct
  source 1..22: mol_type = other RNA
tttttacgatgaaattgaccat

SEQ ID NO: 159492 - RNA, 22 nt, synthetic construct
  source 1..22: mol_type = other RNA
tttttactcatgtctacctgtc

SEQ ID NO: 159493 - RNA, 22 nt, synthetic construct
  source 1..22: mol_type = other RNA
tttttactcgagggtagctttt

SEQ ID NO: 159494 - RNA, 22 nt, synthetic construct
  source 1..22: mol_type = other RNA
tttttactgtccaaacagtgac

SEQ ID NO: 159495 - RNA, 22 nt, synthetic construct
  source 1..22: mol_type = other RNA
tttttactttgcgaaacacact

SEQ ID NO: 159496 - RNA, 22 nt, synthetic construct
  source 1..22: mol_type = other RNA
tttttagagagatgcctgtgct

SEQ ID NO: 159497 - RNA, 22 nt, synthetic construct
  source 1..22: mol_type = other RNA
tttttagcttcatataagtgga

SEQ ID NO: 159498 - RNA, 22 nt, synthetic construct
  source 1..22: mol_type = other RNA
tttttaggtagggataagaata

SEQ ID NO: 159499 - RNA, 22 nt, synthetic construct
  source 1..22: mol_type = other RNA
tttttagtaagaggtatcacca

SEQ ID NO: 159500 - RNA, 22 nt, synthetic construct
  source 1..22: mol_type = other RNA
tttttagtagagatgaggtttt

SEQ ID NO: 159501 - RNA, 22 nt, synthetic construct
  source 1..22: mol_type = other RNA
tttttagtagtaagttgtgtca

SEQ ID NO: 159502 - RNA, 22 nt, synthetic construct
  source 1..22: mol_type = other RNA
tttttagtgactggcttaatgc

SEQ ID NO: 159503 - RNA, 22 nt, synthetic construct
  source 1..22: mol_type = other RNA
tttttatatgcattaagccagt

SEQ ID NO: 159504 - RNA, 22 nt, synthetic construct
  source 1..22: mol_type = other RNA
tttttatatttccgatgatacc

SEQ ID NO: 159505 - RNA, 22 nt, synthetic construct
  source 1..22: mol_type = other RNA
tttttatcaaaatcaaggtgcg

SEQ ID NO: 159506 - RNA, 22 nt, synthetic construct
  source 1..22: mol_type = other RNA
tttttatgcatttggtctcatt

SEQ ID NO: 159507 - RNA, 22 nt, synthetic construct
  source 1..22: mol_type = other RNA
tttttatgtgctttctcaacac

SEQ ID NO: 159508 - RNA, 22 nt, synthetic construct
  source 1..22: mol_type = other RNA
tttttattctgttctagctcct

SEQ ID NO: 159509 - RNA, 22 nt, synthetic construct
  source 1..22: mol_type = other RNA
tttttcaaatacctagttttcc

SEQ ID NO: 159510 - RNA, 22 nt, synthetic construct
  source 1..22: mol_type = other RNA
tttttcacaaacacacaaacca

SEQ ID NO: 159511 - RNA, 22 nt, synthetic construct
  source 1..22: mol_type = other RNA
tttttcacactataacagatgg

SEQ ID NO: 159512 - RNA, 22 nt, synthetic construct
  source 1..22: mol_type = other RNA
tttttcacattcttcaccattc

SEQ ID NO: 159513 - RNA, 22 nt, synthetic construct
  source 1..22: mol_type = other RNA
tttttcacattgcacagtctcc

SEQ ID NO: 159514 - RNA, 22 nt, synthetic construct
  source 1..22: mol_type = other RNA
tttttcaccagcggcatacagg

SEQ ID NO: 159515 - RNA, 22 nt, synthetic construct
  source 1..22: mol_type = other RNA
tttttcacttcgttcagtttag

SEQ ID NO: 159516 - RNA, 22 nt, synthetic construct
  source 1..22: mol_type = other RNA
tttttcagattgaccttgtatc

SEQ ID NO: 159517 - RNA, 22 nt, synthetic construct
  source 1..22: mol_type = other RNA
tttttcagcagcagagaagtga

SEQ ID NO: 159518 - RNA, 22 nt, synthetic construct
  source 1..22: mol_type = other RNA
tttttcagccctgatagatatt

SEQ ID NO: 159519 - RNA, 22 nt, synthetic construct
  source 1..22: mol_type = other RNA
tttttcaggggggccactggaa

SEQ ID NO: 159520 - RNA, 22 nt, synthetic construct
  source 1..22: mol_type = other RNA
tttttcaggttcaagcgactct

SEQ ID NO: 159521 - RNA, 22 nt, synthetic construct
  source 1..22: mol_type = other RNA
tttttcatccaaacagaaaccc

SEQ ID NO: 159522 - RNA, 22 nt, synthetic construct
  source 1..22: mol_type = other RNA
tttttccaacagtttacacgcc

SEQ ID NO: 159523 - RNA, 22 nt, synthetic construct
  source 1..22: mol_type = other RNA
tttttccacataaagtcttgct

SEQ ID NO: 159524 - RNA, 22 nt, synthetic construct
  source 1..22: mol_type = other RNA
tttttccacataattgaaccca

SEQ ID NO: 159525 - RNA, 22 nt, synthetic construct
  source 1..22: mol_type = other RNA
tttttccaggaccaatttacca

SEQ ID NO: 159526 - RNA, 22 nt, synthetic construct
  source 1..22: mol_type = other RNA
tttttcccagatacgttaaagg

SEQ ID NO: 159527 - RNA, 22 nt, synthetic construct
  source 1..22: mol_type = other RNA
tttttcccccctggaacaatca

SEQ ID NO: 159528 - RNA, 22 nt, synthetic construct
  source 1..22: mol_type = other RNA
tttttcccgctacacaagtatt

SEQ ID NO: 159529 - RNA, 22 nt, synthetic construct
  source 1..22: mol_type = other RNA
tttttccgtctagccacttcct

SEQ ID NO: 159530 - RNA, 22 nt, synthetic construct
  source 1..22: mol_type = other RNA
tttttcctcccttcagcctgtg

SEQ ID NO: 159531 - RNA, 22 nt, synthetic construct
  source 1..22: mol_type = other RNA
tttttccttatggatatctggc

SEQ ID NO: 159532 - RNA, 22 nt, synthetic construct
  source 1..22: mol_type = other RNA
tttttccttctttgggggaagc

SEQ ID NO: 159533 - RNA, 22 nt, synthetic construct
  source 1..22: mol_type = other RNA
tttttcctttgcctaagtctca

SEQ ID NO: 159534 - RNA, 22 nt, synthetic construct
  source 1..22: mol_type = other RNA
tttttcctttgcctttcacttt

SEQ ID NO: 159535 - RNA, 22 nt, synthetic construct
  source 1..22: mol_type = other RNA
tttttctaaactggttttcctg

SEQ ID NO: 159536 - RNA, 22 nt, synthetic construct
  source 1..22: mol_type = other RNA
tttttctaggtagtttctttga

SEQ ID NO: 159537 - RNA, 22 nt, synthetic construct
  source 1..22: mol_type = other RNA
tttttctagtttgaggtgtaca

SEQ ID NO: 159538 - RNA, 22 nt, synthetic construct
  source 1..22: mol_type = other RNA
tttttctcgacacacaatccaa

SEQ ID NO: 159539 - RNA, 22 nt, synthetic construct
  source 1..22: mol_type = other RNA
tttttctctccttgcacattag

SEQ ID NO: 159540 - RNA, 22 nt, synthetic construct
  source 1..22: mol_type = other RNA
tttttctgaccaactatttcac

SEQ ID NO: 159541 - RNA, 22 nt, synthetic construct
  source 1..22: mol_type = other RNA
tttttctgagtatattctgtga

SEQ ID NO: 159542 - RNA, 22 nt, synthetic construct
  source 1..22: mol_type = other RNA
tttttctgattgcccattataa

SEQ ID NO: 159543 - RNA, 22 nt, synthetic construct
  source 1..22: mol_type = other RNA
tttttctgcaattggaagacta

SEQ ID NO: 159544 - RNA, 22 nt, synthetic construct
  source 1..22: mol_type = other RNA
tttttctgcatcttttgagggt

SEQ ID NO: 159545 - RNA, 22 nt, synthetic construct
  source 1..22: mol_type = other RNA
tttttctggaccacaatcttac

SEQ ID NO: 159546 - RNA, 22 nt, synthetic construct
  source 1..22: mol_type = other RNA
tttttcttacctaagcatcgtg

SEQ ID NO: 159547 - RNA, 22 nt, synthetic construct
  source 1..22: mol_type = other RNA
tttttcttagttccattattcc

SEQ ID NO: 159548 - RNA, 22 nt, synthetic construct
  source 1..22: mol_type = other RNA
tttttcttcccatctcactcac

SEQ ID NO: 159549 - RNA, 22 nt, synthetic construct
  source 1..22: mol_type = other RNA
tttttcttcttgttttgttctc

SEQ ID NO: 159550 - RNA, 22 nt, synthetic construct
  source 1..22: mol_type = other RNA
tttttcttgctttgctgcccca

SEQ ID NO: 159551 - RNA, 22 nt, synthetic construct
  source 1..22: mol_type = other RNA
tttttcttggtggtaactgatg

SEQ ID NO: 159552 - RNA, 22 nt, synthetic construct
  source 1..22: mol_type = other RNA
tttttcttgtgggtattttgtt

SEQ ID NO: 159553 - RNA, 22 nt, synthetic construct
  source 1..22: mol_type = other RNA
tttttctttcgcatcattcaaa

SEQ ID NO: 159554 - RNA, 22 nt, synthetic construct
  source 1..22: mol_type = other RNA
tttttgaaaagaacaacatggt

SEQ ID NO: 159555 - RNA, 22 nt, synthetic construct
  source 1..22: mol_type = other RNA
tttttgaacaagagcgtcgtac

SEQ ID NO: 159556 - RNA, 22 nt, synthetic construct
  source 1..22: mol_type = other RNA
tttttgacagatgagactctta

SEQ ID NO: 159557 - RNA, 22 nt, synthetic construct
  source 1..22: mol_type = other RNA
tttttgacagccacgtgtattg

SEQ ID NO: 159558 - RNA, 22 nt, synthetic construct
  source 1..22: mol_type = other RNA
tttttgagacacggtctcacac

SEQ ID NO: 159559 - RNA, 22 nt, synthetic construct
  source 1..22: mol_type = other RNA
tttttgagacagattctctgtc

SEQ ID NO: 159560 - RNA, 22 nt, synthetic construct
  source 1..22: mol_type = other RNA
tttttgagacagggtctcactc

SEQ ID NO: 159561 - RNA, 22 nt, synthetic construct
  source 1..22: mol_type = other RNA
tttttgagacggaatcttaccc

SEQ ID NO: 159562 - RNA, 22 nt, synthetic construct
  source 1..22: mol_type = other RNA
tttttgagatttgagtcttgct

SEQ ID NO: 159563 - RNA, 22 nt, synthetic construct
  source 1..22: mol_type = other RNA
tttttgattactgactcaatct

SEQ ID NO: 159564 - RNA, 22 nt, synthetic construct
  source 1..22: mol_type = other RNA
tttttgcaaaccaaatgcagaa

SEQ ID NO: 159565 - RNA, 22 nt, synthetic construct
  source 1..22: mol_type = other RNA
tttttgcagagacggggtccca

SEQ ID NO: 159566 - RNA, 22 nt, synthetic construct
  source 1..22: mol_type = other RNA
tttttgccaaattatttgagag

SEQ ID NO: 159567 - RNA, 22 nt, synthetic construct
  source 1..22: mol_type = other RNA
tttttgccaagtataagatgat

SEQ ID NO: 159568 - RNA, 22 nt, synthetic construct
  source 1..22: mol_type = other RNA
tttttgccagtgttttaaagca

SEQ ID NO: 159569 - RNA, 22 nt, synthetic construct
  source 1..22: mol_type = other RNA
tttttgcccactcttatatcct

SEQ ID NO: 159570 - RNA, 22 nt, synthetic construct
  source 1..22: mol_type = other RNA
tttttgcctttcgcttttggag

SEQ ID NO: 159571 - RNA, 22 nt, synthetic construct
  source 1..22: mol_type = other RNA
tttttgctcacacttactaaat

SEQ ID NO: 159572 - RNA, 22 nt, synthetic construct
  source 1..22: mol_type = other RNA
tttttggcatacaactgctcat

SEQ ID NO: 159573 - RNA, 22 nt, synthetic construct
  source 1..22: mol_type = other RNA
tttttgggatcacacttgatgg

SEQ ID NO: 159574 - RNA, 22 nt, synthetic construct
  source 1..22: mol_type = other RNA
tttttgggatctgtcatgtttg

SEQ ID NO: 159575 - RNA, 22 nt, synthetic construct
  source 1..22: mol_type = other RNA
tttttgggcctttctgtttgtt

SEQ ID NO: 159576 - RNA, 22 nt, synthetic construct
  source 1..22: mol_type = other RNA
tttttggtagaggattccaggt

SEQ ID NO: 159577 - RNA, 22 nt, synthetic construct
  source 1..22: mol_type = other RNA
tttttggtagataccagaccct

SEQ ID NO: 159578 - RNA, 22 nt, synthetic construct
  source 1..22: mol_type = other RNA
tttttggtgtttttctaggtag

SEQ ID NO: 159579 - RNA, 22 nt, synthetic construct
  source 1..22: mol_type = other RNA
tttttggttcacttgaaacctg

SEQ ID NO: 159580 - RNA, 22 nt, synthetic construct
  source 1..22: mol_type = other RNA
tttttgtaataacttggagaac

SEQ ID NO: 159581 - RNA, 22 nt, synthetic construct
  source 1..22: mol_type = other RNA
tttttgtagagacagaatctta

SEQ ID NO: 159582 - RNA, 22 nt, synthetic construct
  source 1..22: mol_type = other RNA
tttttgtagtgtcttaatccta

SEQ ID NO: 159583 - RNA, 22 nt, synthetic construct
  source 1..22: mol_type = other RNA
tttttgtatcctgtttgagaag

SEQ ID NO: 159584 - RNA, 22 nt, synthetic construct
  source 1..22: mol_type = other RNA
tttttgtattctgacctaaagt

SEQ ID NO: 159585 - RNA, 22 nt, synthetic construct
  source 1..22: mol_type = other RNA
tttttgtcaagtgactccaagc

SEQ ID NO: 159586 - RNA, 22 nt, synthetic construct
  source 1..22: mol_type = other RNA
tttttgtcacacggaaaacatt

SEQ ID NO: 159587 - RNA, 22 nt, synthetic construct
  source 1..22: mol_type = other RNA
tttttgtccaccagacaaaaat

SEQ ID NO: 159588 - RNA, 22 nt, synthetic construct
  source 1..22: mol_type = other RNA
tttttgtctggaacacacatta

SEQ ID NO: 159589 - RNA, 22 nt, synthetic construct
  source 1..22: mol_type = other RNA
tttttgtctggtggacaaaaaa

SEQ ID NO: 159590 - RNA, 22 nt, synthetic construct
  source 1..22: mol_type = other RNA
tttttgtgagttttaactcttg

SEQ ID NO: 159591 - RNA, 22 nt, synthetic construct
  source 1..22: mol_type = other RNA
tttttgtggagatggggacttg

SEQ ID NO: 159592 - RNA, 22 nt, synthetic construct
  source 1..22: mol_type = other RNA
tttttgtgtagaggtgaagtta

SEQ ID NO: 159593 - RNA, 22 nt, synthetic construct
  source 1..22: mol_type = other RNA
tttttgttatggtaggtgcttt

SEQ ID NO: 159594 - RNA, 22 nt, synthetic construct
  source 1..22: mol_type = other RNA
tttttgttgttggtttgtgtgt

SEQ ID NO: 159595 - RNA, 22 nt, synthetic construct
  source 1..22: mol_type = other RNA
tttttgtttgtttctgaggtgg

SEQ ID NO: 159596 - RNA, 22 nt, synthetic construct
  source 1..22: mol_type = other RNA
tttttgttttctccttctggaa

SEQ ID NO: 159597 - RNA, 22 nt, synthetic construct
  source 1..22: mol_type = other RNA
tttttgttttggtcaaaactgt

SEQ ID NO: 159598 - RNA, 22 nt, synthetic construct
  source 1..22: mol_type = other RNA
ttttttaagtggcgctgtttgc

SEQ ID NO: 159599 - RNA, 22 nt, synthetic construct
  source 1..22: mol_type = other RNA
ttttttaatctacaaaacaggg

SEQ ID NO: 159600 - RNA, 22 nt, synthetic construct
  source 1..22: mol_type = other RNA
ttttttaatgtagatcctgagg

SEQ ID NO: 159601 - RNA, 22 nt, synthetic construct
  source 1..22: mol_type = other RNA
ttttttactgtccaaacagtga

SEQ ID NO: 159602 - RNA, 22 nt, synthetic construct
  source 1..22: mol_type = other RNA
ttttttagcttcatataagtgg

SEQ ID NO: 159603 - RNA, 22 nt, synthetic construct
  source 1..22: mol_type = other RNA
ttttttagtagtaagttgtgtc

SEQ ID NO: 159604 - RNA, 22 nt, synthetic construct
  source 1..22: mol_type = other RNA
ttttttatgtgctttctcaaca

SEQ ID NO: 159605 - RNA, 22 nt, synthetic construct
  source 1..22: mol_type = other RNA
ttttttcacactataacagatg

SEQ ID NO: 159606 - RNA, 22 nt, synthetic construct
  source 1..22: mol_type = other RNA
ttttttcacattgcacagtctc

SEQ ID NO: 159607 - RNA, 22 nt, synthetic construct
  source 1..22: mol_type = other RNA
ttttttcaccagcggcatacag

SEQ ID NO: 159608 - RNA, 22 nt, synthetic construct
  source 1..22: mol_type = other RNA
ttttttcacttcgttcagttta

SEQ ID NO: 159609 - RNA, 22 nt, synthetic construct
  source 1..22: mol_type = other RNA
ttttttccacataattgaaccc

SEQ ID NO: 159610 - RNA, 22 nt, synthetic construct
  source 1..22: mol_type = other RNA
ttttttcccagatacgttaaag

SEQ ID NO: 159611 - RNA, 22 nt, synthetic construct
  source 1..22: mol_type = other RNA
ttttttcccccctggaacaatc

SEQ ID NO: 159612 - RNA, 22 nt, synthetic construct
  source 1..22: mol_type = other RNA
ttttttcccgctacacaagtat

SEQ ID NO: 159613 - RNA, 22 nt, synthetic construct
  source 1..22: mol_type = other RNA
ttttttcctcccttcagcctgt

SEQ ID NO: 159614 - RNA, 22 nt, synthetic construct
  source 1..22: mol_type = other RNA
ttttttccttatggatatctgg

SEQ ID NO: 159615 - RNA, 22 nt, synthetic construct
  source 1..22: mol_type = other RNA
ttttttccttctttgggggaag

SEQ ID NO: 159616 - RNA, 22 nt, synthetic construct
  source 1..22: mol_type = other RNA
ttttttcctttgcctttcactt

SEQ ID NO: 159617 - RNA, 22 nt, synthetic construct
  source 1..22: mol_type = other RNA
ttttttctgattgcccattata

SEQ ID NO: 159618 - RNA, 22 nt, synthetic construct
  source 1..22: mol_type = other RNA
ttttttctggaccacaatctta

SEQ ID NO: 159619 - RNA, 22 nt, synthetic construct
  source 1..22: mol_type = other RNA
ttttttcttcccatctcactca

SEQ ID NO: 159620 - RNA, 22 nt, synthetic construct
  source 1..22: mol_type = other RNA
ttttttctttcgcatcattcaa

SEQ ID NO: 159621 - RNA, 22 nt, synthetic construct
  source 1..22: mol_type = other RNA
ttttttgagacacggtctcaca

SEQ ID NO: 159622 - RNA, 22 nt, synthetic construct
  source 1..22: mol_type = other RNA
ttttttgagacagattctctgt

SEQ ID NO: 159623 - RNA, 22 nt, synthetic construct
  source 1..22: mol_type = other RNA
ttttttgagacggaatcttacc

SEQ ID NO: 159624 - RNA, 22 nt, synthetic construct
  source 1..22: mol_type = other RNA
ttttttgagatttgagtcttgc

SEQ ID NO: 159625 - RNA, 22 nt, synthetic construct
  source 1..22: mol_type = other RNA
ttttttgcagagacggggtccc

SEQ ID NO: 159626 - RNA, 22 nt, synthetic construct
  source 1..22: mol_type = other RNA
ttttttgccaagtataagatga

SEQ ID NO: 159627 - RNA, 22 nt, synthetic construct
  source 1..22: mol_type = other RNA
ttttttgcccactcttatatcc

SEQ ID NO: 159628 - RNA, 22 nt, synthetic construct
  source 1..22: mol_type = other RNA
ttttttgcctttcgcttttgga

SEQ ID NO: 159629 - RNA, 22 nt, synthetic construct
  source 1..22: mol_type = other RNA
ttttttggcatacaactgctca

SEQ ID NO: 159630 - RNA, 22 nt, synthetic construct
  source 1..22: mol_type = other RNA
ttttttgggatcacacttgatg

SEQ ID NO: 159631 - RNA, 22 nt, synthetic construct
  source 1..22: mol_type = other RNA
ttttttggtagaggattccagg

SEQ ID NO: 159632 - RNA, 22 nt, synthetic construct
  source 1..22: mol_type = other RNA
ttttttggtagataccagaccc

SEQ ID NO: 159633 - RNA, 22 nt, synthetic construct
  source 1..22: mol_type = other RNA
ttttttggtgtttttctaggta

SEQ ID NO: 159634 - RNA, 22 nt, synthetic construct
  source 1..22: mol_type = other RNA
ttttttgtagagacagaatctt

SEQ ID NO: 159635 - RNA, 22 nt, synthetic construct
  source 1..22: mol_type = other RNA
ttttttgtagtgtcttaatcct

SEQ ID NO: 159636 - RNA, 22 nt, synthetic construct
  source 1..22: mol_type = other RNA
ttttttgtccaccagacaaaaa

SEQ ID NO: 159637 - RNA, 22 nt, synthetic construct
  source 1..22: mol_type = other RNA
ttttttgtggagatggggactt

SEQ ID NO: 159638 - RNA, 22 nt, synthetic construct
  source 1..22: mol_type = other RNA
ttttttgttatggtaggtgctt

SEQ ID NO: 159639 - RNA, 22 nt, synthetic construct
  source 1..22: mol_type = other RNA
ttttttgttgttggtttgtgtg

SEQ ID NO: 159640 - RNA, 22 nt, synthetic construct
  source 1..22: mol_type = other RNA
ttttttgtttgtttctgaggtg

SEQ ID NO: 159641 - RNA, 22 nt, synthetic construct
  source 1..22: mol_type = other RNA
ttttttgttttggtcaaaactg

SEQ ID NO: 159642 - RNA, 20 nt, synthetic construct
  source 1..20: mol_type = other RNA
aaaaaaatgtacttggttcc

SEQ ID NO: 159643 - RNA, 17 nt, synthetic construct
  source 1..17: mol_type = other RNA
aaaatgtacttggttcc

SEQ ID NO: 159644 - RNA, 17 nt, synthetic construct
  source 1..17: mol_type = other RNA
aaaaatgtacttggttc

SEQ ID NO: 159645 - RNA, 17 nt, synthetic construct
  source 1..17: mol_type = other RNA
aaaaaatgtacttggtt

SEQ ID NO: 159646 - RNA, 17 nt, synthetic construct
  source 1..17: mol_type = other RNA
aaaaaaatgtacttggt

SEQ ID NO: 159647 - DNA, 800 bp, synthetic construct
  source 1..800: mol_type = other DNA
tgaaaactaaggtcaagagagattaaataacttccatgagattacatagcaaggaagcagaatgtccatcaggaaaaccagtttagaaaaataatttacatagtgctcttctgatcacagaagtgttttgatagttgcagattcatcttgacttcacttccaagtcccggaagctgggctagagccaggaagtcagcaactcttggccattttcttttaaatgtattaaatcattcatctaaacgtttggtgactgaattcccacaaaatatgaagcattaatgcaacctgctttcctcatgtccatagttaatgtgtgaagaaggaatgtgcactcttttaaacccatttcatgccatcctggatttgggaaggatggccagtcatgtggggactttgtggcctcttcccttgtgcacctcgggttcaagccccagttctgcgcaattgcagccagagagtggaaagagccagcctgatgatgatggtgatgctaacgtgcttgctctgcggcaggcattgtgctcagtggttctgcgtgttattttaatcgaatcctcacaacaggcctgagccgtcggtatgttaataaccctgttttgtagattaaaaaattaaaacctggtaataatgaaagctcccaatgcttgaagagcgcttctatgtgacaaacacttttcaaacacttaacatatattaactcatttaaacgtcagagcagcactgatgtgtagttattattgtcattaccttatagatgacgaaagtgaagcccagagaggctaggtgacctgccagag

SEQ ID NO: 159648 - DNA, 32 bp, synthetic construct
  source 1..32: mol_type = other DNA
tactgacatccactttgcctttctctccacag

SEQ ID NO: 159649 - DNA, 714 bp, synthetic construct
  source 1..714: mol_type = other DNA
gtgagcaagggcgaggagctgttcaccggggtggtgcccatcctggtcgagctggacggcgacgtaaacggccacaagttcagcgtgtccggcgagggcgagggcgatgccacctacggcaagctgaccctgaagttcatctgcaccaccggcaagctgcccgtgccctggcccaccctcgtgaccaccctgacctacggcgtgcagtgcttcagccgctaccccgaccacatgaagcagcacgacttcttcaagtccgccatgcccgaaggctacgtccaggagcgcaccatcttcttcaaggacgacggcaactacaagacccgcgccgaggtgaagttcgagggcgacaccctggtgaaccgcatcgagctgaagggcatcgacttcaaggaggacggcaacatcctggggcacaagctggagtacaactacaacagccacaacgtctatatcatggccgacaagcagaagaacggcatcaaggtgaacttcaagatccgccacaacatcgaggacggcagcgtgcagctcgccgaccactaccagcagaacacccccatcggcgacggccccgtgctgctgcccgacaaccactacctgagcacccagtccgccctgagcaaagaccccaacgagaagcgcgatcacatggtcctgctggagttcgtgaccgccgccgggatcactctcggcatggacgagctgtacaag

SEQ ID NO: 159650 - DNA, 156 bp, synthetic construct
  source 1..156: mol_type = other DNA
tcctacccatacgatgttccagattacgcggccgctgccaccaacttcagcctgctgaagcaggccggcgacgtggaggagaaccccggccccggaagcggagagggcagaggaagtctgctaacatgcggtgacgtcgaggagaatcctggacct

SEQ ID NO: 159651 - DNA, 63 bp, synthetic construct
  source 1..63: mol_type = other DNA
atgatttctccagtgctcatcttgttctcgagttttctctgccatgttgctattgcaggacgg

SEQ ID NO: 159652 - DNA, 47 bp, synthetic construct
  source 1..47: mol_type = other DNA
gtaagttcaaggttacaagacaggtttaaggagaccaatagaaactg

SEQ ID NO: 159653 - DNA, 800 bp, synthetic construct
  source 1..800: mol_type = other DNA
ttggcacagccagtcagtgatggaggtggaactctgtcatggtgtgtctgcgccttaaagccacactcttggtctttctcccaggtcagtagtacagtgagtagaagagtaatggttggccgaggccagtccctagtgtctccataccccctggaaataagtttcatggacttcctattttataatgggcaatcagaaaaaaaacacagggactgatgaagaacctgttcatttgagaatttcaggtgtgtaaacactgttctgcgtggttttttttttacatgaaagtattttatgtatttgtatattttgaaaaaacttcccttagctctcatgtcagagacacatactgaaagacagacctctattaaatcatgatgtttggctccttaccactataatccagatggacaaattaccatgtttccataaaaagcgttggagacagcctaaaccattttcaatcttggaaatgatacctcatttatactttaatatttaaagctctaataaaagctggagttatttgtataaattactgtctgtgaaaataatacctaacagccggcatatgtcactgtaagaataatgtctttttacacttggagttttccccctacacccagttcaccagtttctaattagaattaagtttaaatgttaaaaaatcaaaagaccaagaattttccattcatgtaatgcaaactctaaataataggttttttcattttactgctatacaaccggaaaatgcttaacaagaatcctgctattttattagatagtggtttgaagcttca

SEQ ID NO: 159654 - DNA, 2612 bp, synthetic construct
  source 1..2612: mol_type = other DNA
tgaaaactaaggtcaagagagattaaataacttccatgagattacatagcaaggaagcagaatgtccatcaggaaaaccagtttagaaaaataatttacatagtgctcttctgatcacagaagtgttttgatagttgcagattcatcttgacttcacttccaagtcccggaagctgggctagagccaggaagtcagcaactcttggccattttcttttaaatgtattaaatcattcatctaaacgtttggtgactgaattcccacaaaatatgaagcattaatgcaacctgctttcctcatgtccatagttaatgtgtgaagaaggaatgtgcactcttttaaacccatttcatgccatcctggatttgggaaggatggccagtcatgtggggactttgtggcctcttcccttgtgcacctcgggttcaagccccagttctgcgcaattgcagccagagagtggaaagagccagcctgatgatgatggtgatgctaacgtgcttgctctgcggcaggcattgtgctcagtggttctgcgtgttattttaatcgaatcctcacaacaggcctgagccgtcggtatgttaataaccctgttttgtagattaaaaaattaaaacctggtaataatgaaagctcccaatgcttgaagagcgcttctatgtgacaaacacttttcaaacacttaacatatattaactcatttaaacgtcagagcagcactgatgtgtagttattattgtcattaccttatagatgacgaaagtgaagcccagagaggctaggtgacctgccagagtactgacatccactttgcctttctctccacaggtgagcaagggcgaggagctgttcaccggggtggtgcccatcctggtcgagctggacggcgacgtaaacggccacaagttcagcgtgtccggcgagggcgagggcgatgccacctacggcaagctgaccctgaagttcatctgcaccaccggcaagctgcccgtgccctggcccaccctcgtgaccaccctgacctacggcgtgcagtgcttcagccgctaccccgaccacatgaagcagcacgacttcttcaagtccgccatgcccgaaggctacgtccaggagcgcaccatcttcttcaaggacgacggcaactacaagacccgcgccgaggtgaagttcgagggcgacaccctggtgaaccgcatcgagctgaagggcatcgacttcaaggaggacggcaacatcctggggcacaagctggagtacaactacaacagccacaacgtctatatcatggccgacaagcagaagaacggcatcaaggtgaacttcaagatccgccacaacatcgaggacggcagcgtgcagctcgccgaccactaccagcagaacacccccatcggcgacggccccgtgctgctgcccgacaaccactacctgagcacccagtccgccctgagcaaagaccccaacgagaagcgcgatcacatggtcctgctggagttcgtgaccgccgccgggatcactctcggcatggacgagctgtacaagtcctacccatacgatgttccagattacgcggccgctgccaccaacttcagcctgctgaagcaggccggcgacgtggaggagaaccccggccccggaagcggagagggcagaggaagtctgctaacatgcggtgacgtcgaggagaatcctggacctatgatttctccagtgctcatcttgttctcgagttttctctgccatgttgctattgcaggacgggtaagttcaaggttacaagacaggtttaaggagaccaatagaaactgttggcacagccagtcagtgatggaggtggaactctgtcatggtgtgtctgcgccttaaagccacactcttggtctttctcccaggtcagtagtacagtgagtagaagagtaatggttggccgaggccagtccctagtgtctccataccccctggaaataagtttcatggacttcctattttataatgggcaatcagaaaaaaaacacagggactgatgaagaacctgttcatttgagaatttcaggtgtgtaaacactgttctgcgtggttttttttttacatgaaagtattttatgtatttgtatattttgaaaaaacttcccttagctctcatgtcagagacacatactgaaagacagacctctattaaatcatgatgtttggctccttaccactataatccagatggacaaattaccatgtttccataaaaagcgttggagacagcctaaaccattttcaatcttggaaatgatacctcatttatactttaatatttaaagctctaataaaagctggagttatttgtataaattactgtctgtgaaaataatacctaacagccggcatatgtcactgtaagaataatgtctttttacacttggagttttccccctacacccagttcaccagtttctaattagaattaagtttaaatgttaaaaaatcaaaagaccaagaattttccattcatgtaatgcaaactctaaataataggttttttcattttactgctatacaaccggaaaatgcttaacaagaatcctgctattttattagatagtggtttgaagcttca

SEQ ID NO: 159655 - protein, 1370 aa, synthetic construct
MTKVKDYYIGLDIGTSSVGWAVTDEAYNVLKFNSKKMWGVRLFDDAKTAEERRGQRGARRRLDRKKERLSLLQDFFAEEVAKVDPNFFLRLDNSDLYMEDKDQKLKSKYTLFNDKDFKDKNFHKKYPTIHHLLMDLIEDDSKKDIRLVYLACHYLLKNRGHFIFEGQKFDTKSSFENSLNELKVHLNDEYGLDLEFDNENLINILTDPKLNKTAKKKELKSVIGDTKFLKAVSAIMIGSSQKLVDLFENPEDFDDSAIKSVDFSTTSFDDKYSDYELALGDKIALVNILKEIYDSSILENLLKEADKSKDGNKYISNAFVKKYNKHGQDLKEFKRLVRQYHKSAYFDIFRSEKVNDNYVSYTKSSISNNKRVKANKFTDQEAFYKFAKKHLETIKYKINKVNGSKADLELIDGMLRDMEFKNFMPKIKSSDNGVIPYQLKLMELNKILENQSKHHEFLNVSDEYGSVCDKIASIMEFRIPYYVGPLNPNSKYAWIKKQKDSEITPWNFKDVVDLDSSREEFIDSLIGRCTYLKDEKVLPKASLLYNEYMVLNELNNLKLNDLPITEEMKKKIFDQLFKTRKKVTLKAVANLLKKEFNINGEILLSGTDGDFKQGLNSYNDFKAIVGDKVDSDDYRDKIEEIIKLIVLYGDDKSYLQKKIKAGYGKYFTDSEIKKMAGLNYKDWGRLSKKLLTGLEGANKITGERGSIIHFMREYNLNLMELMSASFTFTEEIQKLNPVDDRKLSYEMVDELYLSPSVKRMLWQSLRIVDEIKNIMGTDSKKIFIEMARGKEEVKARKESRKNQLLKFYKDGKKAFISEIGEERYSYLLSEIEGEEENKFRWDNLYLYYTQLGRCMYSLEPIDISELSSKNIYDQDHIYPKSKIYDDSIENRVLVKKDLNSKKGNSYPIPDEILNKNCYAYWKILYDKGLIGQKKYTRLTRRTGFTDDELVQFISRQIVETRQATKETANLLKTICKNSEIVYSKAENASRFRQEFDIVKCRAVNDLHHMHDAYINIIVGNVYNTKFTKDPMNFVKKQEKARSYNLENMFKYDVKRGGYTAWIADDEKGTVKNASIKRIRKELEGTNYRFTRMNYIESGALFNATLQRKNKGSRPLKDKGPKSSIEKYGGYTNINKACFAVLDIKSKNKIERKLMPVEREIYAKQKNDKKLSDEIFSKYLKDRFGIEDYRVVYPVVKMRTLLKIDGSYYFITGGSDKTLELRSALQLILPKKNEWAIKQIDKSSENDYLTIERIQDLTEELVYNTFDIIVNKFKTSVFKKSFLNLFQDDKIENIDFKFKSMDFKEKCKTLLMLVKAIRASGVRQDLKSIDLKSDYGRLSSKTNNIGNYQEFKIINQSITGLFENEVDLLKL

SEQ ID NO: 159656 - protein, 1370 aa, synthetic construct
MTKVKDYYIGLDIGTSSVGWAVTDEAYNVLKFNSKKMWGVRLFDDAKTAEERRGQRGARRRLDRKKERLSLLQDFFAEEVAKVDPNFFLRLDNSDLYMEDKDQKLKSKYTLFNDKDFKDKNFHKKYPTIHHLLMDLIEDDSKKDIRLVYLACHYLLKNRGHFIFEGQKFDTKSSFENSLNELKVHLNDEYGLDLEFDNENLINILTDPKLNKTAKKKELKSVIGDTKFLKAVSAIMIGSSQKLVDLFENPEDFDDSAIKSVDFSTTSFDDKYSDYELALGDKIALVNILKEIYDSSILEALLKEADKSKDGNKYISNAFVKKYNKHGQDLKEFKRLVRQYHKSAYFDIFRSEKVNDNYVSYTKSSISNNKRVKANKFTDQEAFYKFAKKHLETIKYKINKVNGSKADLELIDGMLRDMEFKNFMPKIKSSDNGVIPYQLKLMELNKILENQSKHHEFLNVSDEYGSVCDKIASIMEFRIPYYVGPLNPNSKYAWIKKQKDSEITPWNFKDVVDLDSSREEFIDSLIGRCTYLKDEKVLPKASLLYNEYMVLNELNNLKLNDLPITEEMKKKIFDQLFKTRKKVTLKAVANLLKKEFNINGEILLSGTDGDFKQRLNSYNDFKAIVGDKVDSDDYRDKIEEIIKLIVLYGDDKSYLQKKIKAGYGKYFTDSEIKKMAGLNYKDWGRLSKKLLTGLEGALKITGERGSIIHFMREYNLNLMELMSASFTFTEEIQKLNPVDDRKLSYEMVDELYLSPSVKRMLWQSLRIVDEIKNIMGTDSKKIFIEMARGKEEVKARKESRKNQLLKFYKDGKKAFISEIGEERYSYLLSEIEGEEFNKFRWDNLYLYYTQLGRCMYSLEPIDISELSSKNIYDQDHIYPKSKIYDDSIENRVLVKKDLNSKKGNSYPIPDEILNKNCYAYWKILYDKGLIGQKKYTRLLRRTGFTDDELVQFISRQIVETRQATKETANLLKTICKNSEIVYSKAENASRFRQEFDIVKCRAVNDLHHMHDAYINIIVGNVYNTKFTKDPMNFVKKQEKARSYNLENMFKYDVKRGGYTAWIADDEKGTVKNASIKRIRKELEGTNYRFTRMNYIESGAFFNATLQRKNKGSRPLKDKGPKSSIEKYGGYTNINKACFAVLDIKSKNKIERKLMPVEREIYAKQKNDKKLSDEIFSKYLKDRFGIEDYRVVYPVVKMRTLLKIDGSYYFITGGSDKTLELRSALQLILPKKNEWAIKQIDKSSENDYLTIERIQDLTEELVYNTFDIIVNKFKTSVFKKSFLNLFQDDKIENIDFKFKSMDFKEKCKTLLMLVKAIRASGVRQDLKSIDLKSDYGRLSSKTNNIGNYQEFKIINQSITGLFENEVDLLKL

SEQ ID NO: 159657 - RNA, 80 nt, synthetic construct
  source 1..80: mol_type = other RNA
gtttgagagttatgaaaatgacgagttcaaataaaaatttattcaaaccgcctatttataggccgcagatgttctgcttt
